(19) United States
(12) Patent Application Publication
(10) Pub. No.: US 2016/0207993 A1
(43) Pub. Date: Jul. 21, 2016

(54) ANTIGEN-BINDING CONSTRUCTS

(71) Applicant: Glaxo Group Limited, Brentford (GB)

(72) Inventors: Claire ASHMAN, Stevenage (GB); Thil Batuwangala, Cambridge (GB); Michael Neil Burden, Stevenage (GB); Stephanie Jane Clegg, Stevenage (GB); Rudolf Maria De Wildt, Cambridge (GB); Jonathan Henry Ellis, Stevenage (GB); Paul Andrew Hamblin, Stevenage (GB); Farhana Hussain, Stevenage (GB); Laurent Jespers, Cambridge (GB); Alan Lewis, Stevenage (GB); Martin Anibal Orecchia, Stevenage (GB); Radha Shah, Stevenage (GB); Michael Steward, Cambridge (GB)

(73) Assignee: Glaxo Group Limited

(21) Appl. No.: 14/739,099

(22) Filed: Jun. 15, 2015

Related U.S. Application Data
(63) Continuation of application No. 12/744,799, filed on Sep. 3, 2010, now abandoned.
(60) Provisional application No. 60/911,449, filed on Apr. 12, 2007.
(60) Provisional application No. 61/027,858, filed on Feb. 12, 2008.
(60) Provisional application No. 61/046,572, filed on Apr. 21, 2008.
(60) Provisional application No. 61/081,191, filed on Jul. 16, 2008.
(60) Provisional application No. 61/084,431, filed on Jul. 29, 2008.

(51) Int. Cl. C07K 16/24

(52) U.S. Cl. CPC C07K 16/244; C07K 16/247; C07K 2317/31; C07K 2317/92; C07K 2317/76; C07K 2317/51; C07K 2317/515; C07K 2317/64; C07K 2317/14

(57) ABSTRACT

The invention relates to antigen-binding constructs comprising a protein scaffold which are linked to one or more epitope-binding domains wherein the antigen-binding construct has at least two antigen binding sites at least one of which is from an epitope binding domain and at least one of which is from a paired VH/VL domain, methods of making such constructs and uses thereof.

### BACKGROUND

[0001] Antibodies are well known for use in therapeutic applications.

[0002] Antibodies are heteromultimeric glycoproteins comprising at least two heavy and two light chains. Aside from IgM, intact antibodies are usually heterotetrameric glycoproteins of approximately 150 Kda, composed of two identical light (L) chains and two identical heavy (H) chains. Typically, each light chain is linked to a heavy chain by one covalent disulfide bond while the number of disulfide linkages between the heavy chains of different immunoglobulin isotypes varies. Each heavy and light chain also has intrachain disulfide bridges. Each heavy chain has at one end a variable domain (VH) followed by a number of constant regions. Each light chain has a variable domain (VL) and a constant region at its other end; the constant region of the light chain is aligned with the first constant region of the heavy chain and the light chain variable domain is aligned with the variable domain of the heavy chain. The light chains of antibodies from most vertebrate species can be assigned to one of two types called Kappa and Lambda based on the amino acid sequence of the constant region. Depending on the amino acid sequence of the constant region of their heavy chains, human antibodies can be assigned to five different classes, IgA, IgD, IgE, IgG and IgM. IgG and IgA can be further subdivided into subclasses, IgG1, IgG2, IgG3 and IgG4; and IgA1 and IgA2. Species variants exist with mouse and rat having at least IgG2a, IgG2b. The variable domain of the antibody confers binding specificity upon the antibody with certain regions displaying particular variability called complementarity determining regions (CDRs). The more conserved portions of the variable region are called Framework regions (FR). The variable domains of intact heavy and light chains each comprise four FR connected by three CDRs. The CDRs in each chain are held together in close proximity by the FR regions and with the CDRs from the other chain contribute to the formation of the antigen binding site of antibodies. The constant regions are not directly involved in the binding of the antibody to the antigen but exhibit various effector functions such as participation in antibody dependent cell-mediated cytotoxicity (ADCC), phagocytosis via binding to Fey receptor, half-life/clearance rate via neonatal Fc receptor (FcRn) and complement dependent cytotoxicity via the C1q component of the complement cascade.

[0003] The nature of the structure of an IgG antibody is such that there are two antigen-binding sites, both of which are specific for the same epitope. They are therefore, monospecific.

[0004] A bispecific antibody is an antibody having binding specificities for at least two different epitopes. Methods of making such antibodies are known in the art. Traditionally, the recombinant production of bispecific antibodies is based on the coexpression of two immunoglobulin H chain-L chain pairs, where the two H chains have different binding specificities see Millstein et al, Nature 305 537-539 (1983), WO93/08829 and Traunecker et al EMBO, 10, 1991, 3655-3659. Because of the random assortment of H and L chains, a potential mixture of ten different antibody structures are produced of which only one has the desired binding specificity. An alternative approach involves fusing the variable domains with the desired binding specificities to heavy chain constant region comprising at least part of the hinge region, CH2 and CH3 regions. It is preferred to have the CH1 region containing the site necessary for light chain binding present in at least one of the fusions. DNA encoding these fusions, and if desired the L chain are inserted into separate expression vectors and are then cotransfected into a suitable host organism. It is possible though to insert the coding sequences for two or all three chains into one expression vector. In one approach, a bispecific antibody is composed of a H chain with a first binding specificity in one arm and a H-L chain pair, providing a second binding specificity in the other arm, see WO94/04690. Also see Suresh et al Methods in Enzymology 121, 210, 1986.

[0005] There is a need to find stable antigen-binding constructs which have effective multiple antigen binding sites.

### SUMMARY OF INVENTION

[0006] The invention relates to antigen-binding constructs comprising a protein scaffold, for example an Ig scaffold, for example IgG, for example a monoclonal antibody; which is linked to one or more domain antibodies, wherein the binding construct has at least two antigen binding sites at least one of which is from a paired VH/VL domain in the protein scaffold, and at least one of which is from the domain antibody. In one embodiment the antigen binding construct is capable of binding to two antigens, for example both IL-13 and IL-4.

[0007] The invention further relates to antigen-binding constructs comprising at least one homodimer comprising two or more structures of formula I:

[chemical structure]

[0008] wherein
[0009] X represents a constant antibody region comprising constant heavy domain 2 and constant heavy domain 3;
[0010] R¹, R⁴, R⁷ and R⁸ represent a domain independently selected from an epitope-binding domain;
[0011] R² represents a domain selected from the group consisting of constant heavy chain 1, and an epitope-binding domain;
[0012] R³ represents a domain selected from the group consisting of a paired VH and an epitope-binding domain;
[0013] R⁵ represents a domain selected from the group consisting of constant light chain, and an epitope-binding domain;
[0014] R⁶ represents a domain selected from the group consisting of a paired VL and an epitope-binding domain;
[0015] n represents an integer independently selected from: 0, 1, 2, 3 and 4;
[0016] m represents an integer independently selected from: 0 and 1,
[0017] wherein the Constant Heavy chain 1 and the Constant Light chain domains are associated;
[0018] wherein at least one epitope binding domain is present;
[0019] and when R³ represents a paired VH domain, R⁶ represents a paired VL domain, so that the two domains are together capable of binding antigen.

[0020] The invention relates to IgG based structures which comprise monoclonal antibodies, or fragments linked to one or more domain antibodies, and to methods of making such constructs and uses thereof, particularly uses in therapy.

[0021] The invention also provides a domain antibody comprising or consisting of the polypeptide sequence set out in SEQ ID NO: 2 or SEQ ID NO: 3. In one aspect the invention provides a protein which is expressed from the polynucleotide sequence set out in SEQ ID NO: 60 or SEQ ID NO: 61.

### BRIEF DESCRIPTION OF THE DRAWINGS

[0022] FIGS. 1 to 7: Examples of antigen-binding constructs

[0023] FIG. 8: Schematic diagram of mAbdAb constructs.

[0024] FIG. 9: SEC and SDS Page analysis of PascoH-G4S-474

[0025] FIG. 10: SEC and SDS Page analysis of PascoL-G4S-474

[0026] FIG. 11: SEC and SDS Page analysis of PascoH-474

[0027] FIG. 12: SEC and SDS Page analysis of PascoHL-G4S-474

[0028] FIG. 13: mAbdAb supernatants binding to human IL-13 in a direct binding ELISA

[0029] FIG. 14: mAbdAb supernatants binding to human IL-4 in a direct binding ELISA

[0030] FIG. 15: Purified mAbdAbs binding to human IL-13 in a direct binding ELISA

[0031] FIG. 16: purified mAbdAbs binding to human IL-4 in a direct binding ELISA

[0032] FIG. 17: mAbdAb supernatants binding to human IL-4 in a direct binding ELISA

[0033] FIG. 18: mAbdAb supernatants binding to human IL-13 in a direct binding ELISA

[0034] FIG. 19: purified mAbdAb binding to human IL-4 in a direct binding ELISA

[0035] FIG. 20A: purified mAbdAb binding to human IL-13 in a direct binding ELISA

[0036] FIG. 20B: purified mAbdAb binding to cynomolgus IL-13 in a direct binding ELISA

[0037] FIG. 21: mAbdAb binding kinetics for IL-4 using BIAcore™

[0038] FIG. 22: mAbdAb binding kinetics for IL-4 using BIAcore™

[0039] FIG. 23: mAbdAbs binding kinetics for IL-13 using BIAcore™

[0040] FIG. 24: Purified anti-IL13mAb-anti-IL4dAbs ability to neutralise human IL-13 in a TF-1 cell bioassay

[0041] FIG. 25: Purified anti-IL13mAb-anti-IL4dAbs ability to neutralise human IL-4 in a TF-1 cell bioassay

[0042] FIG. 26: purified anti-IL4mAb-anti-IL13dAbs PascoH-G4S-474, PascoH-474, PascoL-G4S-474 and PascoHL-G4S-474 ability to neutralise human IL-4 in a TF-1 cell bioassay

[0043] FIG. 27: purified anti-IL4mAb-anti-IL13dAbs, PascoH-G4S-474, PascoH-474, PascoL-G4S-474 and PascoHL-G4S-474 ability to neutralise human IL-13 in a TF-1 cell bioassay

[0044] FIG. 28: purified anti-IL4mAb-anti-IL13dAbs, PascoH-G4S-474, PascoH-474, PascoL-G4S-474 and PascoHL-G4S-474 ability to simultaneously neutralise human IL-4 and human IL-13 in a dual neutralisation TF-1 cell bioassay

[0045] FIG. 29: DOM10-53-474 SEC-MALLS

[0046] FIG. 30: DOM9-112-210 SEC-MALLS

[0047] FIG. 31: DOM9-155-25 SEC-MALLS

[0048] FIG. 32: DOM9-155-25 SEC-MALLS Overlay of all three signals

[0049] FIG. 33: DOM9-155-147 SEC-MALLS

[0050] FIG. 34: DOM9-155-159 SEC-MALLS

[0051] FIG. 35: Control for MW assignment by SEC-MALLS: BSA

[0052] FIG. 36: schematic diagram of a trispecific mAbdAb molecule

[0053] FIG. 37: Trispecific mAbdAb IL18 mAb-210-474 (supernatants) binding to human IL-18 in direct binding ELISA

[0054] FIG. 38: Trispecific mAbdAb IL18 mAb-210-474 (supernatants) binding to human IL-13 in direct binding ELISA

[0055] FIG. 39: Trispecific mAbdAb IL18 mAb-210-474 (supernatants) binding to human IL-4 in direct binding ELISA

[0056] FIG. 40: Trispecific mAbdAb Mepo-210-474 (supernatant) binding to human IL-13 in direct binding ELISA

[0057] FIG. 41: Trispecific mAbdAb Mepo-210-474 (supernatant) binding to human IL-4 in direct binding ELISA

[0058] FIG. 42: Cloning of the anti-TNF/anti-EGFR mAb-dAb

[0059] FIG. 43. SDS-PAGE analysis of the anti-TNF/anti-EGFR mAb-dAb

[0060] FIG. 44. SEC profile of the anti-TNF/anti-EGFR mAb-dAb (Example 10)

[0061] FIG. 45: Anti-EGFR activity of Example 10

[0062] FIG. 46. Anti-TNF activity of Example 10

[0063] FIG. 47. SDS-PAGE analysis of the anti-TNF/anti-VEGF mAb-dAb (Example 11)

[0064] FIG. 48. SEC profile of the anti-TNF/anti-VEGF mAb-dAb (Example 11)

[0065] FIG. 49. Anti-VEGF activity of Example 11

[0066] FIG. 50. Anti-TNF activity of example 11

[0067] FIG. 51. Cloning of the anti-VEGF/anti-IL1R1 dAb-extended-IgG (Example 12)

[0068] FIG. 52. SDS-PAGE analysis of the anti-TNF/anti-VEGF dAb-extended IgG A (Example 12)

[0069] FIG. 53: SDS-PAGE analysis of the anti-TNF/anti-VEGF dAb-extended IgG B (Example 12)

[0070] FIG. 54. SEC profile of the anti-TNF/anti-VEGF dAb-extended IgG A (Example 12)

[0071] FIG. 55: SEC profile of the anti-TNF/anti-VEGF dAb-extended IgG B (Example 12)

[0072] FIG. 56. Anti-VEGF activity of Example 12 (DMS2091)

[0073] FIG. 57 Anti-VEGF activity of Example 12 (DMS2090)

[0074] FIG. 58. Anti-IL1R1 activity of Example 12 (DMS2090)

[0075] FIG. 59: Anti-IL1R1 activity of Example 12 (DMS2091)

[0076] FIG. 60: Cloning of the anti-TNF/anti-VEGF/anti-EGFR mAb-dAb (Example 13)

[0077] FIG. 61. SDS-PAGE analysis of the anti-TNF/anti-VEGF/anti-EGFR mAb-dAb (Example 13)

[0078] FIG. 62: Anti-VEGF activity of Example 13

[0079] FIG. 63: Anti-TNF activity of Example 13

[0080] FIG. 64: Anti-EGFR activity of Example 13

[0081] FIG. 65: SEC analysis of purified Bispecific antibodies, BPC1603 (A), BPC1604 (B), BPC1605 (C), BPC1606 (D)

[0082] FIG. 66. Binding of bispecific antibodies to immobilised IGF-1R

[0083] FIG. 67. Binding of Bispecific antibodies to immobilised VEGF

[0084] FIG. 68. Inhibition of ligand mediated receptor phosphorylation by various bispecific antibodies

[0085] FIG. 69: Inhibition of ligand mediated receptor phosphorylation by various bispecific antibodies

[0086] FIG. 70 ADCC assay with anti-CD20/IL-13 bispecific antibody

[0087] FIG. 71: ADCC assay with anti-CD20/IL-13 bispecific antibody

[0088] FIG. 72: ADCC assay with anti-CD20/IL-13 bispecific antibody using a shorter dose range

[0089] FIG. 73: ADCC assay with anti-CD20/IL-13 bispecific antibody using a shorter dose range

[0090] FIG. 74: CDC assay with anti-CD20/IL-13 bispecific antibody

[0091] FIG. 75: CDC assay with anti-CD20/IL-13 bispecific antibody

[0092] FIG. 76: BPC1803 and BPC1804 binding in recombinant human IGF-1R ELISA

[0093] FIG. 77: BPC1803 and BPC1804 binding in recombinant VEGF binding ELISA

[0094] FIG. 78: BPC1805 and BPC1806 binding in recombinant human IGF-1R ELISA

[0095] FIG. 79: BPC1805 and BPC1806 binding in recombinant human HER2 ELISA

[0096] FIG. 80: BPC1807 and BPC1808 binding in recombinant human IGF-1R ELISA

[0097] FIG. 81: BPC1807 and BPC1808 binding in recombinant human HER2 ELISA

[0098] FIG. 82: BPC1809 binding in recombinant human IL-4 ELISA

[0099] FIG. 83: BPC1809 binding in RNAse A ELISA.

[0100] FIG. 84: BPC1816 binding in recombinant human IL-4 ELISA

[0101] FIG. 85: BPC1816 binding in HEL ELISA

[0102] FIG. 86: BPC1801 and BPC 1802 binding in recombinant human IGF-1R ELISA

[0103] FIG. 87: BPC1801 and BPC1802 binding in recombinant human VEGFR2 ELISA

[0104] FIG. 88 BPC1823 and BPC 1822 binding in recombinant human IL-4 ELISA

[0105] FIG. 88b BPC1823 (higher concentration supernatant) binding in recombinant human IL-4 ELISA

[0106] FIG. 89: BPC1823 and BPC1822 binding in recombinant human TNF-α ELISA

[0107] FIG. 89b: BPC1823 (higher concentration supernatant) binding in recombinant human TNF-α ELISA

[0108] FIG. 90: SEC profile for PascoH-474 GS removed

[0109] FIG. 91: SEC profile for PascoH-TVAAPS-474 GS removed

[0110] FIG. 92: SEC profile for PascoH-GS-ASTKGPT-474 2nd GS removed

[0111] FIG. 93: SEC profile for 586H-210 GS removed

[0112] FIG. 94: SEC profile for 586H-TVAAPS-210 GS removed

[0113] FIG. 95: SDS PAGE for PascoH-474 GS removed (lane B) and PascoH-TVAAPS-474 GS removed (lane A)

[0114] FIG. 96: SDS PAGE for PascoH-GS-ASTKGPT-474 2nd GS removed [A=nonreducing conditions, B=reducing conditions]

[0115] FIG. 97: SDS PAGE for 586H-210 GS removed (lane A)

[0116] FIG. 98: SDS PAGE for 586H-TVAAPS-210 GS removed (lane A)

[0117] FIG. 99: Purified PascoH-474 GS removed and PascoH-TVAAPS-474 GS removed binding in human IL-4 ELISA

[0118] FIG. 100: Purified PascoH-474 GS removed and PascoH-TVAAPS-474 GS removed binding in human IL-13 ELISA

[0119] FIG. 101: Purified PascoH-474 GS removed, PascoH-TVAAPS-474 GS removed, PascoH-616 and PascoH-TVAAPS-616 binding in cynomolgus IL-13 ELISA

[0120] FIG. 102: mAbdAbs inhibition of human IL-4 binding to human IL-4Rα by ELISA

[0121] FIG. 103: mAbdAbs inhibition of human IL-4 binding to human IL-4Rα by ELISA

[0122] FIG. 104 Neutralisation of human IL-13 in TF-1 cell bioassays by mAbdAbs

[0123] FIG. 105: Neutralisation of cynomolgus IL-13 in TF-1 cell bioassays by mAbdAbs

[0124] FIG. 106: Neutralisation of human IL-4 in TF-1 cell bioassays by mAbdAbs

[0125] FIG. 107: Neutralisation of cynomolgus IL-4 in TF-1 cell bioassays by mAbdAbs

[0126] FIG. 108: Ability of mAbdAbs to inhibit binding of human IL-13 binding to human IL-13Rα2

[0127] FIG. 109: SEC profile for PascoH-616

[0128] FIG. 110: SEC profile for PascoH-TVAAPS_616

[0129] FIG. 111: SDS PAGE for PascoH-616 [E1=non-reducing conditions, E2=reducing conditions]

[0130] FIG. 112: SDS PAGE for PascoH-TVAAPS-616 [A=non-reducing conditions, B=reducing conditions]

[0131] FIG. 113: purified PascoH-616 and PascoH-TVAAPS-616 binding in human IL-13 ELISA

[0132] FIG. 114: Neutralisation of human IL-13 in TF-1 cell bioassays by mAbdAbs

[0133] FIG. 114a: Neutralisation of cynomolgus IL-13 in TF-1 cell bioassays by mAbdAbs

[0134] FIG. 115: Inhibition of IL-4 activity by PascoH-474 GS removed

[0135] FIG. 116: Inhibition of IL-13 activity by PascoH-474 GS removed

[0136] FIG. 117: Inhibition of IL-4 activity by 586-TVAAPS-210

[0137] FIG. 118: Inhibition of IL-13 activity by 586-TVAAPS-210

[0138] FIG. 119: Inhibition of IL-4 activity by Pascolizumab

[0139] FIG. 120: Inhibition of IL-4 activity by DOM9-112-210

[0140] FIG. 121: Inhibition of IL-13 activity by anti-IL13 mAb

[0141] FIG. 122: Inhibition of IL-13 activity by DOM10-53-474

[0142] FIG. 123: Activity of control mAb and dAb in IL-4 whole blood assay

[0143] FIG. 124: Activity of control mAb and dAb in IL-13 whole blood assay

[0144] FIG. 125: The concentration of drug remaining at various time points post-dose assessed by ELISA against both TNF & EGFR.

[0145] FIG. 126: The concentration of drug remaining at various time points post-dose assessed by ELISA against both TNF & VEGF.

[0146] FIG. 127: The concentration of drug remaining at various time points post-dose assessed by ELISA against both IL1R1 & VEGF.

[0147] FIG. 128: SDS-PAGE of the purified DMS4010

[0148] FIG. 129: SEC profile of the purified DMS4010

[0149] FIG. 130: Anti-EGFR potency of DMS4010

[0150] FIG. 131: anti-VEGF receptor binding assay

[0151] FIG. 132: pharmacokinetic profile of the dual targeting anti-EGFR/anti-VEGF mAbdAb

[0152] FIG. 133: SDS-PAGE analysis purified DMS4011

[0153] FIG. 134: SEC profile of the purified DMS4011

[0154] FIG. 135: Anti-EGFR potency of DMS4011

[0155] FIG. 136: DMS4011 in anti-VEGF receptor binding assay

[0156] FIG. 137: SDS-PAGE analysis of the purified samples DMS4023 and DMS4024

[0157] FIG. 138: The SEC profile for DMS4023

[0158] FIG. 139: The SEC profile for DMS4024

[0159] FIG. 140: Anti-EGFR potency of the mAbdAb DMS4023

[0160] FIG. 141: DMS4023 and DMS4024 in anti-VEGF receptor binding assay

[0161] FIG. 142: SDS-PAGE analysis of the purified DMS4009

[0162] FIG. 143: The SEC profile for DMS4009

[0163] FIG. 144: Anti-EGFR potency of the mAbdAb DMS4009

[0164] FIG. 145: DMS4009 in anti-VEGF receptor binding assay

[0165] FIG. 146: SDS-PAGE analysis of the purified DMS4029

[0166] FIG. 147: The SEC profile for DMS4029

[0167] FIG. 148: Anti-EGFR potency of the mAbdAb DMS4029

[0168] FIG. 149: DMS4029 in the IL-13 cell-based neutralisation assay

[0169] FIG. 150: SDS-PAGE analysis of the purified samples DMS4013 and DMS4027

[0170] FIG. 151: The SEC profile for DMS4013

[0171] FIG. 152: The SEC profile for DMS4027

[0172] FIG. 153: Anti-EGFR potency of the mAbdAb DMS4013

[0173] FIG. 154: DMS4013 in anti-VEGF receptor binding assay

[0174] FIG. 155: BPC1616 binding in recombinant human IL-12 ELISA

[0175] FIG. 156: BPC1616 binding in recombinant human IL-18 ELISA

[0176] FIG. 157: BPC1616 binding in recombinant human IL-4 ELISA

[0177] FIG. 158: BPC1008, 1009 and BPC1010 binding in recombinant human IL-4 ELISA

[0178] FIG. 159: BPC1008 binding in recombinant human IL-5 ELISA

[0179] FIG. 160: BPC1008, 1009 and BPC1010 binding in recombinant human IL-13 ELISA

[0180] FIG. 161: BPC1017 and BPC1018 binding in recombinant human c-MET ELISA

[0181] FIG. 162: BPC1017 and BPC1018 binding in recombinant human VEGF ELISA

[0182] FIG. 163: SEC profile for PascoH-TVAAPS-546

[0183] FIG. 164: SEC profile for PascoH-TVAAPS-567

[0184] FIG. 165: SDS PAGE for PascoH-TVAAPS-546 [A=non-reducing conditions, B=reducing conditions]

[0185] FIG. 166: SDS PAGE for PascoH-TVAAPS-567 [A=non-reducing conditions, B=reducing conditions]

[0186] FIG. 167: neutralisation data for human IL-13 in the TF-1 cell bioassay

[0187] FIG. 168: neutralisation data for cynomolgus IL-13 in the TF-1 cell bioassay

[0188] FIG. 169: mAbdAbs containing alternative isotypes binding in human IL-4 ELISA

[0189] FIG. 170: mAbdAbs containing alternative isotypes binding in human IL-13 ELISA

[0190] FIG. 171: BPC1818 and BPC1813 binding in recombinant human EGFR ELISA

[0191] FIG. 172: BPC1818 and BPC1813 binding in recombinant human VEGFR2 ELISA

[0192] FIG. 173: anti-IL5mAb-anti-IL13dAb binding in IL-13 ELISA

[0193] FIG. 174: anti-IL5mAb-anti-IL13dAb binding in IL-5 ELISA

[0194] FIG. 175: BPC1812 binding in recombinant human VEGFR2 ELISA

[0195] FIG. 176: BPC1812 binding in recombinant human EGFR ELISA

[0196] FIG. 177: mAbdAb binding in human IL-13 ELISA

[0197] FIG. 178: schematic diagram illustrating the construction of a mAbdAb heavy chain or mAbdAb light chain

### DEFINITIONS

[0198] The term ‘Protein Scaffold’ as used herein includes but is not limited to an immunoglobulin (Ig) scaffold, for example an IgG scaffold, which may be a four chain or two chain antibody, or which may comprise only the Fc region of an antibody, or which may comprise one or more constant regions from an antibody, which constant regions may be of human or primate origin, or which may be an artificial chimera of human and primate constant regions. Such protein scaffolds may comprise antigen-binding sites in addition to the one or more constant regions, for example where the protein scaffold comprises a full IgG. Such protein scaffolds will be capable of being linked to other protein domains, for example protein domains which have antigen-binding sites, for example epitope-binding domains or ScFv domains.

[0199] A “domain” is a folded protein structure which has tertiary structure independent of the rest of the protein. Generally, domains are responsible for discrete functional properties of proteins, and in many cases may be added, removed or transferred to other proteins without loss of function of the remainder of the protein and/or of the domain. A “single antibody variable domain” is a folded polypeptide domain comprising sequences characteristic of antibody variable domains. It therefore includes complete antibody variable domains and modified variable domains, for example, in which one or more loops have been replaced by sequences which are not characteristic of antibody variable domains, or antibody variable domains which have been truncated or comprise N- or C-terminal extensions, as well as folded fragments of variable domains which retain at least the binding activity and specificity of the full-length domain.

[0200] The phrase “immunoglobulin single variable domain” refers to an antibody variable domain (V_{H}, V_{HH}, V_{L}) that specifically binds an antigen or epitope independently of a different V region or domain. An immunoglobulin single variable domain can be present in a format (e.g., homo- or hetero-multimer) with other, different variable regions or variable domains where the other regions or domains are not required for antigen binding by the single immunoglobulin variable domain (i.e., where the immunoglobulin single variable domain binds antigen independently of the additional variable domains). A “domain antibody” or “dAb” is the same as an “immunoglobulin single variable domain” which is capable of binding to an antigen as the term is used herein. An immunoglobulin single variable domain may be a human antibody variable domain, but also includes single antibody variable domains from other species such as rodent (for example, as disclosed in WO 00/29004, nurse shark and Camelid V_{HH} dAbs. Camelid V_{HH} are immunoglobulin single variable domain polypeptides that are derived from species including camel, llama, alpaca, dromedary, and guanaco, which produce heavy chain antibodies naturally devoid of light chains. Such V_{HH} domains may be humanised according to standard techniques available in the art, and such domains are still considered to be “domain antibodies” according to the invention. As used herein “V_{H} includes camelid V_{HH} domains.

[0201] The term “Epitope-binding domain” refers to a domain that specifically binds an antigen or epitope independently of a different V region or domain, this may be a domain antibody or may be a domain which is a derivative of a scaffold selected from the group consisting of CTLA-4, lipocalin, SpA, an Affibody, an avimer, GroEl, transferrin, GroES and fibronectin, which has been subjected to protein engineering in order to obtain binding to a ligand other than the natural ligand.

[0202] As used herein, the terms “paired VH domain”, “paired VL domain”, and “paired VH/VL domains” refer to antibody variable domains which specifically bind antigen only when paired with their partner variable domain. There is always one VH and one VL in any pairing, and the term “paired VH domain” refers to the VH partner, the term “paired VL domain” refers to the VL partner, and the term “paired VH/VL domains” refers to the two domains together.

[0203] In one embodiment of the invention the antigen binding site bind to antigen with a Kd of at least 1 mM, for example a Kd of 10 nM, 1 nM, 500 pM, 200 pM, 100 pM, to each antigen as measured by Biacore™, such as the Biacore™ method as described in method 4 or 5.

[0204] As used herein, the term “antigen binding site” refers to a site on a construct which is capable of specifically binding to antigen, this may be a single domain, for example an epitope-binding domain, or it may be paired VH/VL domains as can be found on a standard antibody. In some aspects of the invention single-chain Fv (ScFv) domains can provide antigen-binding sites.

[0205] The terms “mAb/dAb” and dAb/mAb” are used herein to refer to antigen-binding constructs of the present invention. The two terms can be used interchangeably, and are intended to have the same meaning as used herein.

### DESCRIPTION OF INVENTION

[0206] The present invention relates to antigen-binding constructs comprising a protein scaffold, for example an Ig scaffold such as IgG, for example a monoclonal antibody, which is linked to one or more epitope-binding domains, for example a domain antibody, wherein the binding construct has at least two antigen binding sites, at least one of which is from an epitope binding domain, and to methods of producing and uses thereof, particularly uses in therapy.

[0207] Some examples of antigen-binding constructs according to the invention are set out in FIG. 1.

[0208] The present invention relates to an antigen-binding construct comprising a protein scaffold which is linked to one or more epitope-binding domains wherein the antigen-binding construct has at least two antigen binding sites at least one of which is from an epitope binding domain and at least one of which is from a paired VH/VL domain.

[0209] In one embodiment the protein scaffold of the antigen-binding construct of the present invention is an Ig scaffold, for example an IgG scaffold or IgA scaffold. The IgG scaffold may comprise all the domains of an antibody.

[0210] The antigen-binding construct of the present invention has at least two antigen binding sites, for examples it has two binding sites, for examples where the first binding site has specificity for a first epitope on an antigen and the second binding site has specificity for a second epitope on the same antigen. In a further embodiment there are 4 antigen binding sites, or 6 antigen binding sites, or 8 antigen binding sites, or 10 or more antigen-binding sites.

[0211] In another aspect the invention relates to an antigen-binding construct comprising at least one homodimer comprising two or more structures of formula I:

[chemical structure]

[0212] wherein
[0213] X represents a constant antibody region comprising constant heavy domain 2 and constant heavy domain 3;
[0214] R¹, R⁴, R⁷ and R⁸ represent a domain independently selected from an epitope-binding domain;
[0215] R² represents a domain selected from the group consisting of constant heavy chain 1, and an epitope-binding domain;
[0216] R³ represents a domain selected from the group consisting of a paired VH and an epitope-binding domain;
[0217] R⁵ represents a domain selected from the group consisting of constant light chain, and an epitope-binding domain;
[0218] R⁶ represents a domain selected from the group consisting of a paired VL and an epitope-binding domain;
[0219] n represents an integer independently selected from: 0, 1, 2, 3 and 4;
[0220] m represents an integer independently selected from: 0 and 1,
[0221] wherein the Constant Heavy chain 1 and the Constant Light chain domains are associated;
[0222] wherein at least one epitope binding domain is present;
[0223] and when R³ represents a paired VH domain, R⁶ represents a paired VL domain, so that the two domains are together capable of binding antigen.
[0224] In one embodiment R⁶ represents a paired VL and R³ represents a paired VH.
[0225] In a further embodiment either one or both of R⁷ and R⁸ represent an epitope binding domain.
[0226] In yet a further embodiment either one or both of R¹ and R⁴ represent an epitope binding domain.
[0227] In one embodiment R⁴ is present.
[0228] In one embodiment R¹ R⁷ and R⁸ represent an epitope binding domain.
[0229] In one embodiment R¹ R⁷ and R⁸, and R⁴ represent an epitope binding domain.
[0230] In one embodiment (R¹)ₙ, (R²)ₘ, (R⁴)ₘ and (R⁵)ₘ=0, i.e. are not present, R³ is a paired VH domain, R⁶ is a paired VL domain, R⁸ is a VH dAb, and R⁷ is a VL dAb.
[0231] In another embodiment (R¹)ₙ, (R²)ₘ, (R⁴)ₘ and (R⁵)ₘ are 0, i.e. are not present, R³ is a paired VH domain, R⁶ is a paired VL domain, R⁸ is a VH dAb, and (R⁷)ₘ=0 i.e. not present.
[0232] In another embodiment (R²)ₘ, and (R⁵)ₘ are 0, i.e. are not present, R¹ is a dAb, R⁴ is a dAb, R³ is a paired VH domain, R⁶ is a paired VL domain, (R⁸), and (R⁷)ₘ=0 i.e. not present.
[0233] In one embodiment of the present invention the epitope binding domain is a dAb.
[0234] In one embodiment the antigen-binding construct of the present invention has specificity for more than one antigen, for example where it is capable of binding two or more antigens selected from IL-13, IL-5, and IL-4, for example where it is capable of binding IL-13 and IL-4 simultaneously.
[0235] In a further embodiment the antigen-binding construct of the present invention is capable of binding two or more antigens selected from VEGF, IGF-1R and EGFR, or for example it is capable of binding to TNF and IL1-R.
[0236] In one embodiment of the present invention there are four domain antibodies, two of the domain antibodies may have specificity for the same antigen, or all of the domain antibodies present in the antigen-binding construct may have specificity for the same antigen.
[0237] In one embodiment of the present invention at least one of the single variable domains is directly attached to the Ig scaffold with a linker comprising from 1 to 150 amino acids, for example 1 to 20 amino acids. Such linkers may be selected from any one of those set out in SEQ ID NO:6 to 11.
[0238] An antigen-binding construct according to any preceding claim wherein at least one of the epitope binding domains binds human serum albumin.
[0239] In one embodiment, there are at least 5 antigen binding sites, for example 6 antigen binding sites and the antigen binding construct is capable of binding at least 5 antigens simultaneously, for example it is capable if binding 6 antigens simultaneously.
[0240] The invention also provides the antigen-binding constructs for use in medicine, for example for use in the manufacture of a medicament for treating asthma, cancer or rheumatoid arthritis or osteoarthritis.
[0241] The invention provides a method of treating a patient suffering from asthma, cancer, rheumatoid arthritis or osteoarthritis comprising administering a therapeutic amount of an antigen-binding construct of the invention.
[0242] The antigen-binding constructs of the invention may be used for the treatment of asthma, cancer, rheumatoid arthritis or osteoarthritis.

[0243] The antigen-binding constructs of the invention may have some effector function. For example if the protein scaffold contains an Fc region derived from an antibody with effector function, for example if the protein scaffold comprises CH2 and CH3 from IgG1. Levels of effector function can be varied according to known techniques, for example by mutations in the CH2 domain, for example wherein the IgG1 CH2 domain has one or more mutations at positions selected from 239 and 332 and 330, for example the mutations are selected from S239D and 1332E and A330L such that the antibody has enhanced effector function, and/or for example altering the glycosylation profile of the antigen-binding construct of the invention such that there is a reduction in fucosylation of the Fc region.

[0244] Protein scaffolds of the present invention may be linked to epitope-binding domains by the use of linkers. Examples of suitable linkers include amino acid sequences which may be from 1 amino acid to 150 amino acids in length, or from 1 amino acid to 140 amino acids, for example, from 1 amino acid to 130 amino acids, or from 1 to 120 amino acids, or from 1 to 80 amino acids, or from 1 to 50 amino acids, or from 1 to 20 amino acids, or from 1 to 10 amino acids, or from 5 to 18 amino acids. Such sequences may have their own tertiary structure, for example, a linker of the present invention may comprise a single variable domain. The size of a linker in one embodiment is equivalent to a single variable domain. Suitable linkers may be of a size from 1 to 20 angstroms, for example less than 15 angstroms, or less than 10 angstroms, or less than 5 angstroms.

[0245] Epitope-binding domains of use in the present invention are domains that specifically bind an antigen or epitope independently of a different V region or domain, this may be an domain antibody or other suitable domains such as a domain selected from the group consisting of CTLA-4, lipocallin, SpA, an Affibody, an avimer, GroEl, transferrin, GroES and fibronectin.

[0246] Epitope-binding domains can be linked to the protein scaffold at one or more positions. These positions include the C-terminus and the N-terminus of the protein scaffold, for example at the C-terminus of the heavy chain and/or the C-terminus of the light chain of an IgG, or for example the N-terminus of the heavy chain and/or the N-terminus of the light chain of an IgG.

[0247] When the epitope-binding domain is a domain antibody, some domain antibodies may be suited to particular positions within the scaffold.

[0248] Domain antibodies of use in the present invention can be linked at the C-terminal end of the heavy chain and/or the light chain of conventional IgGs. In addition some dAbs can be linked to the C-terminal ends of both the heavy chain and the light chain of conventional antibodies.

[0249] In constructs where the N-terminus of dAbs are fused to an antibody constant domain (either C_{H}3 or CL), a peptide linker may help the dAb to bind to antigen. Indeed, the N-terminal end of a dAb is located closely to the complementarity-determining regions (CDRS) involved in antigen-binding activity. Thus a short peptide linker acts as a spacer between the epitope-binding, and the constant domain to the protein scaffold, which may allow the dAb CDRs to more easily reach the antigen, which may therefore bind with high affinity.

[0250] The surroundings in which dAbs are linked to the IgG will differ depending on which antibody chain they are fused to:

When fused at the C-terminal end of the antibody light chain of an IgG scaffold, each dAb is expected to be located in the vicinity of the antibody hinge and the Fc portion. It is likely that such dAbs will be located far apart from each other. In conventional antibodies, the angle between Fab fragments and the angle between each Fab fragment and the Fc portion can vary quite significantly. It is likely that—with dAb-mAbs—the angle between the Fab fragments will not be widely different, whilst some angular restrictions may be observed with the angle between each Fab fragment and the Fc portion.
When fused at the C-terminal end of the antibody heavy chain of an IgG scaffold, each dAb is expected to be located in the vicinity of the C_{H}3 domains of the Fc portion. This is not expected to impact on the Fc binding properties to Fc receptors (e.g. FcγRI, II, III an FcRn) as these receptors engage with the C_{H}2 domains (for the FcγRI, II and III class of receptors) or with the hinge between the C_{H}2 and C_{H}3 domains (e.g. FcRn receptor). Another feature of such antigen-binding constructs is that both dAbs are expected to be spatially close to each other and provided that flexibility is provided by provision of appropriate linkers, these dAbs may even form homodimeric species, hence propagating the ‘zipped’ quaternary structure of the Fc portion, which may enhance stability of the construct.

[0251] Such structural considerations can aid in the choice of the most suitable position to link an epitope-binding domain, for example a dAb, on to a protein scaffold, for example an antibody.

[0252] The size of the antigen, its localization (in blood or on cell surface), its quaternary structure (monomeric or multimeric) can vary. Conventional antibodies are naturally designed to function as adaptor constructs due to the presence of the hinge region, wherein the orientation of the two antigen-binding sites at the tip of the Fab fragments can vary widely and hence adapt to the molecular feature of the antigen and its surroundings. In contrast dAbs linked to an antibody or other protein scaffold, for example a protein scaffold which comprises an antibody with no hinge region, may have less structural flexibility either directly or indirectly.

[0253] Understanding the solution state and mode of binding at the dAb is also helpful. Evidence has accumulated that in vitro dAbs can predominantly exist in monomeric, homo-dimeric or multimeric forms in solution (Reiter et al. (1999) J Mol Biol 290 p 685-698; Ewert et al (2003) J Mol Biol 325, p 531-553, Jespers et al (2004) J Mol Biol 337 p 893-903; Jespers et al (2004) Nat Biotechnol 22 p 1161-1165; Martin et al (1997) Protein Eng. 10 p 607-614; Sepulvada et al (2003) J Mol Biol 333 p 355-365). This is fairly reminiscent to multimerisation events observed in vivo with Ig domains such as Bence-Jones proteins (which are dimers of immunoglobulin light chains (Epp et al (1975) Biochemistry 14 p 4943-4952; Huan et al (1994) Biochemistry 33 p 14848-14857; Huang et al (1997) Mol immunol 34 p 1291-1301) and amyloid fibers (James et al. (2007) J Mol Biol. 367:603-8).

[0254] For example, it may be desirable to link domain antibodies that tend to dimerise in solution to the C-terminal end of the Fc portion in preference to the C-terminal end of the light chain as linking to the C-terminal end of the Fc will allow those dAbs to dimerise in the context of the antigen-binding construct of the invention.

[0255] The antigen-binding constructs of the present invention may comprise antigen-binding sites specific for a single antigen, or may have antigen-binding sites specific for two or more antigens, or for two or more epitopes on a single antigen, or there may be antigen-binding sites each of which is specific for a different epitope on the same or different antigens.

[0256] The antigen-binding sites can each have binding specificity for an antigen, such as human or animal proteins, including cytokines, growth factors, cytokine receptors, growth factor receptors, enzymes (e.g., proteases), co-factors for enzymes, DNA binding proteins, lipids and carbohydrates. Suitable targets, including cytokines, growth factors, cytokine receptors, growth factor receptors and other proteins include but are not limited to: ApoE, Apo-SAA, BDNF, Cardiotrophin-1, CEA, CD40, CD40 Ligand, CD56, CD38, CD138, EGF, EGF receptor, ENA-78, Eotaxin, Eotaxin-2, Exodus-2, FAPα, FGF-acidic, FGF-basic, fibroblast growth factor-10, FLT3 ligand, Fractalkine (CX3C), GDNF, G-CSF, GM-CSF, GF-β1, human serum albumin, insulin, IFN-γ, IGF-I, IGF-II, IL-1α, IL-1β, IL-1 receptor, IL-1 receptor type 1, IL-2, IL-3, IL-4, IL-5, IL-6, IL-7, IL-8 (72 a.a.), IL-8 (77 a.a.), IL-9, IL-10, IL-11, IL-12, IL-13, IL-15, IL-16, IL-17, IL-18 (IGIF), Inhibin α, Inhibin β, IP-10, keratinocyte growth factor-2 (KGF-2), KGF, Leptin, LIF, Lymphotactin, Mullerian inhibitory substance, monocyte colony inhibitory factor, monocyte attractant protein, M-CSF, c-fms, v-fmsMDC (67 a.a.), MDC (69 a.a.), MCP-1 (MCAF), MCP-2, MCP-3, MCP-4, MDC (67 a.a.), MDC (69 a.a.), MIG, MIP-1α, MIP-1β, MIP-3α, MIP-3β, MIP-4, myeloid progenitor inhibitor factor-1 (MPIF-1), NAP-2, Neurturin, Nerve growth factor, β-NGF, NT-3, NT-4, Oncostatin M, PDGF-AA, PDGF-AB, PDGF-BB, PF-4, RANTES, SDF1α, SDF1β, SCF, SCGF, stem cell factor (SCF), TARC, TGF-α, TGF-β, TGF-β2, TGF-β3, tumour necrosis factor (TNF), TNF-α, TNF-β, TNF receptor I, TNF receptor II, TNIL-1, TPO, VEGF, VEGF A, VEGF B, VEGF C, VEGF D, VEGF receptor 1, VEGF receptor 2, VEGF receptor 3, GCP-2, GRO/MGSA, GRO-β, GRO-γ, HCC1, 1-309, HER 1, HER 2, HER 3, HER 4, serum albumin, vWF, amyloid proteins (e.g., amyloid alpha), MMP12, PDK1, IgE, and other targets disclosed herein. It will be appreciated that this list is by no means exhaustive.

[0257] In some embodiments, the protease resistant peptide or polypeptide binds a target in pulmonary tissue, such as a target selected from the group consisting of TNFR1, IL-1, IL-1R, IL-4, IL-4R, IL-5, IL-6, IL-6R, IL-8, IL-8R, IL-9, IL-9R, IL-10, IL-12 IL-12R, IL-13, IL-13Rα1, IL-13Rα2, IL-15, IL-15R, IL-16, IL-17R, IL-17, IL-18, IL-18R, IL-23 IL-23R, IL-25, CD2, CD4, CD11a, CD23, CD25, CD27, CD28, CD30, CD40, CD40L, CD56, CD138, ALK5, EGFR, FcER1, TGFb, CCL2, CCL18, CEA, CR8, CTGF, CXCL12 (SDF-1), chymase, FGF, Furin, Endothelin-1, Eotaxins (e.g., Eotaxin, Eotaxin-2, Eotaxin-3), GM-CSF, ICAM-1, ICOS, IgE, IFNa, 1-309, integrins, L-selectin, MIF, MIP4, MDC, MCP-1, MMPs, neutrophil elastase, osteopontin, OX-40, PARC, PD-1, RANTES, SCF, SDF-1, siglec8, TARC, TGFb, Thrombin, Tim-1, TNF, TRANCE, Tryptase, VEGF, VLA-4, VCAM, α4β7, CCR2, CCR3, CCR4, CCR5, CCR7, CCR8, alphavbeta6, alphavbeta8, cMET, CD8, vWF, amyloid proteins (e.g., amyloid alpha), MMP12, PDK1, and IgE.

[0258] In particular, the antigen-binding constructs of the present invention may be useful in treating diseases associated with IL-13, IL-5 and IL-4, for example atopic dermatitis, allergic rhinitis, Crohn's disease, COPD, fibrotic diseases or disorders such as idiopathic pulmonary fibrosis, progressive systemic sclerosis, hepatic fibrosis, hepatic granulomas, schistosomiasis, leishmaniasis, diseases of cell cycle regulation such as Hodgkins disease, B cell chronic lymphocytic leukaemia, for example the constructs may be useful in treating asthma.

[0259] Alternative antigen-binding constructs of the present invention may be useful in treating diseases associated with growth factors such as IGF-1R, VEGF, and EGFR, for example cancer or rheumatoid arthritis, examples of types of cancer in which such therapies may be useful are breast cancer, prostrate cancer, lung cancer and myeloma.

[0260] Alternative antigen-binding constructs of the present invention may be useful in treating diseases associated with TNF and IL1-R, for example arthritis, for example rheumatoid arthritis or osteoarthritis.

[0261] There are several methods known in the art which can be used to find epitope-binding domains of use in the present invention.

[0262] The term “library” refers to a mixture of heterogeneous polypeptides or nucleic acids. The library is composed of members, each of which has a single polypeptide or nucleic acid sequence. To this extent, “library” is synonymous with “repertoire.” Sequence differences between library members are responsible for the diversity present in the library. The library may take the form of a simple mixture of polypeptides or nucleic acids, or may be in the form of organisms or cells, for example bacteria, viruses, animal or plant cells and the like, transformed with a library of nucleic acids. In one example, each individual organism or cell contains only one or a limited number of library members. Advantageously, the nucleic acids are incorporated into expression vectors, in order to allow expression of the polypeptides encoded by the nucleic acids. In a one aspect, therefore, a library may take the form of a population of host organisms, each organism containing one or more copies of an expression vector containing a single member of the library in nucleic acid form which can be expressed to produce its corresponding polypeptide member. Thus, the population of host organisms has the potential to encode a large repertoire of diverse polypeptides.

[0263] A “universal framework” is a single antibody framework sequence corresponding to the regions of an antibody conserved in sequence as defined by Kabat (“Sequences of Proteins of Immunological Interest”, US Department of Health and Human Services) or corresponding to the human germline immunoglobulin repertoire or structure as defined by Chothia and Lesk, (1987) J. Mol. Biol. 196:910-917. There may be a single framework, or a set of such frameworks, which has been found to permit the derivation of virtually any binding specificity though variation in the hypervariable regions alone.

[0264] Amino acid and nucleotide sequence alignments and homology, similarity or identity, as defined herein are in one embodiment prepared and determined using the algorithm BLAST 2 Sequences, using default parameters (Tatusova, T. A. et al., FEMS Microbiol Lett, 174:187-188 (1999)).

[0265] The epitope binding domain(s) and antigen binding sites can each have binding specificity for a generic ligand or any desired target ligand, such as human or animal proteins, including cytokines, growth factors, cytokine receptors, growth factor receptors, enzymes (e.g., proteases), co-factors for enzymes, DNA binding proteins, lipids and carbohydrates. Suitable targets, including cytokines, growth factors, cytokine receptors, growth factor receptors and other proteins include but are not limited to: ApoE, Apo-SAA, BDNF, Cardiotrophin-1, CEA, CD40, CD40 Ligand, CD56, CD38, CD138, EGF, EGF receptor, ENA-78, Eotaxin, Eotaxin-2, Exodus-2, FAPα, FGF-acidic, FGF-basic, fibroblast growth factor-10, FLT3 ligand, Fractalkine (CX3C), GDNF, G-CSF, GM-CSF, GF-β1, human serum albumin, insulin, IFN-γ, IGF-I, IGF-II, IL-1α, IL-1β, IL-1 receptor, IL-1 receptor type 1, IL-2, IL-3, IL-4, IL-5, IL-6, IL-7, IL-8 (72 a.a.), IL-8 (77 a.a.), IL-9, IL-10, IL-11, IL-12, IL-13, IL-15, IL-16, IL-17, IL-18 (IGIF), Inhibin α, Inhibin β, IP-10, keratinocyte growth factor-2 (KGF-2), KGF, Leptin, LIF, Lymphotactin, Mullerian inhibitory substance, monocyte colony inhibitory factor, monocyte attractant protein, M-CSF, c-fms, v-fmsMDC (67 a.a.), MDC (69 a.a.), MCP-1 (MCAF), MCP-2, MCP-3, MCP-4, MDC (67 a.a.), MDC (69 a.a.), MIG, MIP-1α, MIP-1β, MIP-3α, MIP-3β, MIP-4, myeloid progenitor inhibitor factor-1 (MPIF-1), NAP-2, Neurturin, Nerve growth factor, β-NGF, NT-3, NT-4, Oncostatin M, PDGF-AA, PDGF-AB, PDGF-BB, PF-4, RANTES, SDF1α, SDF1β, SCF, SCGF, stem cell factor (SCF), TARC, TGF-α, TGF-β, TGF-β2, TGF-β3, tumour necrosis factor (TNF), TNF-α, TNF-β, TNF receptor I, TNF receptor II, TNIL-1, TPO, VEGF, VEGF A, VEGF B, VEGF C, VEGF D, VEGF receptor 1, VEGF receptor 2, VEGF receptor 3, GCP-2, GRO/MGSA, GRO-β, GRO-γ, HCC1, 1-309, HER 1, HER 2, HER 3, HER 4, serum albumin, vWF, amyloid proteins (e.g., amyloid alpha), MMP12, PDK1, IgE, and other targets disclosed herein. It will be appreciated that this list is by no means exhaustive.

[0266] In some embodiments, binding is to a target in pulmonary tissue, such as a target selected from the group consisting of TNFR1, IL-1, IL-1R, IL-4, IL-4R, IL-5, IL-6, IL-6R, IL-8, IL-8R, IL-9, IL-9R, IL-10, IL-12 IL-12R, IL-13, IL-13Rα1, IL-13Ra2, IL-15, IL-15R, IL-16, IL-17R, IL-17, IL-18, IL-18R, IL-23 IL-23R, IL-25, CD2, CD4, CD11a, CD23, CD25, CD27, CD28, CD30, CD40, CD40L, CD56, CD138, ALK5, EGFR, FcER1, TGFb, CCL2, CCL18, CEA, CR8, CTGF, CXCL12 (SDF-1), chymase, FGF, Furin, Endothelin-1, Eotaxins (e.g., Eotaxin, Eotaxin-2, Eotaxin-3), GM-CSF, ICAM-1, ICOS, IgE, IFNa, 1-309, integrins, L-selectin, MIF, MIP4, MDC, MCP-1, MMPs, neutrophil elastase, osteopontin, OX-40, PARC, PD-1, RANTES, SCF, SDF-1, siglec8, TARC, TGFb, Thrombin, Tim-1, TNF, TRANCE, Tryptase, VEGF, VLA-4, VCAM, α4β7, CCR2, CCR3, CCR4, CCR5, CCR7, CCR8, alphavbeta6, alphavbeta8, cMET, CD8, vWF, amyloid proteins (e.g., amyloid alpha), MMP12, PDK1, and IgE.

[0267] When a display system (e.g., a display system that links coding function of a nucleic acid and functional characteristics of the peptide or polypeptide encoded by the nucleic acid) is used in the methods described herein, eg in the selection of a dAb or other epitope binding domain, it is frequently advantageous to amplify or increase the copy number of the nucleic acids that encode the selected peptides or polypeptides. This provides an efficient way of obtaining sufficient quantities of nucleic acids and/or peptides or polypeptides for additional rounds of selection, using the methods described herein or other suitable methods, or for preparing additional repertoires (e.g., affinity maturation repertoires). Thus, in some embodiments, the methods of selecting epitope binding domains comprises using a display system (e.g., that links coding function of a nucleic acid and functional characteristics of the peptide or polypeptide encoded by the nucleic acid, such as phage display) and further comprises amplifying or increasing the copy number of a nucleic acid that encodes a selected peptide or polypeptide. Nucleic acids can be amplified using any suitable methods, such as by phage amplification, cell growth or polymerase chain reaction.

[0268] In one example, the methods employ a display system that links the coding function of a nucleic acid and physical, chemical and/or functional characteristics of the polypeptide encoded by the nucleic acid. Such a display system can comprise a plurality of replicable genetic packages, such as bacteriophage or cells (bacteria). The display system may comprise a library, such as a bacteriophage display library. Bacteriophage display is an example of a display system.

[0269] A number of suitable bacteriophage display systems (e.g., monovalent display and multivalent display systems) have been described. (See, e.g., Griffiths et al., U.S. Pat. No. 6,555,313 B1 (incorporated herein by reference); Johnson et al., U.S. Pat. No. 5,733,743 (incorporated herein by reference); McCafferty et al., U.S. Pat. No. 5,969,108 (incorporated herein by reference); Mulligan-Kehoe, U.S. Pat. No. 5,702,892 (Incorporated herein by reference); Winter, G. et al., Annu. Rev. Immunol. 12:433-455 (1994); Soumillion, P. et al., Appl. Biochem. Biotechnol. 47(2-3):175-189 (1994); Castagnoli, L. et al., Comb. Chem. High Throughput Screen, 4(2):121-133 (2001).) The peptides or polypeptides displayed in a bacteriophage display system can be displayed on any suitable bacteriophage, such as a filamentous phage (e.g., fd, M13, F1), a lytic phage (e.g., T4, T7, lambda), or an RNA phage (e.g., MS2), for example.

[0270] Generally, a library of phage that displays a repertoire of peptides or phagepolypeptides, as fusion proteins with a suitable phage coat protein (e.g., fd pill protein), is produced or provided. The fusion protein can display the peptides or polypeptides at the tip of the phage coat protein, or if desired at an internal position. For example, the displayed peptide or polypeptide can be present at a position that is amino-terminal to domain 1 of pill. (Domain 1 of pill is also referred to as N1.) The displayed polypeptide can be directly fused to pill (e.g., the N-terminus of domain 1 of pill) or fused to pill using a linker. If desired, the fusion can further comprise a tag (e.g., myc epitope, His tag). Libraries that comprise a repertoire of peptides or polypeptides that are displayed as fusion proteins with a phage coat protein, can be produced using any suitable methods, such as by introducing a library of phage vectors or phagemid vectors encoding the displayed peptides or polypeptides into suitable host bacteria, and culturing the resulting bacteria to produce phage (e.g., using a suitable helper phage or complementing plasmid if desired). The library of phage can be recovered from the culture using any suitable method, such as precipitation and centrifugation.

[0271] The display system can comprise a repertoire of peptides or polypeptides that contains any desired amount of diversity. For example, the repertoire can contain peptides or polypeptides that have amino acid sequences that correspond to naturally occurring polypeptides expressed by an organism, group of organisms, desired tissue or desired cell type, or can contain peptides or polypeptides that have random or randomized amino acid sequences. If desired, the polypeptides can share a common core or scaffold. For example, all polypeptides in the repertoire or library can be based on a scaffold selected from protein A, protein L, protein G, a fibronectin domain, an anticalin, CTLA4, a desired enzyme (e.g., a polymerase, a cellulase), or a polypeptide from the immunoglobulin superfamily, such as an antibody or antibody fragment (e.g., an antibody variable domain). The polypeptides in such a repertoire or library can comprise defined regions of random or randomized amino acid sequence and regions of common amino acid sequence. In certain embodiments, all or substantially all polypeptides in a repertoire are of a desired type, such as a desired enzyme (e.g., a polymerase) or a desired antigen-binding fragment of an antibody (e.g., human V_{H} or human V_{L}). In some embodiments, the polypeptide display system comprises a repertoire of polypeptides wherein each polypeptide comprises an antibody variable domain. For example, each polypeptide in the repertoire can contain a V_{H}, a V_{L} or an Fv (e.g., a single chain Fv). Amino acid sequence diversity can be introduced into any desired region of a peptide or polypeptide or scaffold using any suitable method. For example, amino acid sequence diversity can be introduced into a target region, such as a complementarity determining region of an antibody variable domain or a hydrophobic domain, by preparing a library of nucleic acids that encode the diversified polypeptides using any suitable mutagenesis methods (e.g., low fidelity PCR, oligonucleotide-mediated or site directed mutagenesis, diversification using NNK codons) or any other suitable method. If desired, a region of a polypeptide to be diversified can be randomized. The size of the polypeptides that make up the repertoire is largely a matter of choice and uniform polypeptide size is not required. The polypeptides in the repertoire may have at least tertiary structure (form at least one domain).

### Selection/Isolation/Recovery

[0272] An epitope binding domain or population of domains can be selected, isolated and/or recovered from a repertoire or library (e.g., in a display system) using any suitable method. For example, a domain is selected or isolated based on a selectable characteristic (e.g., physical characteristic, chemical characteristic, functional characteristic). Suitable selectable functional characteristics include biological activities of the peptides or polypeptides in the repertoire, for example, binding to a generic ligand (e.g., a superantigen), binding to a target ligand (e.g., an antigen, an epitope, a substrate), binding to an antibody (e.g., through an epitope expressed on a peptide or polypeptide), and catalytic activity. (See, e.g., Tomlinson et al., WO 99/20749; WO 01/57065; WO 99/58655.)

[0273] In some embodiments, the protease resistant peptide or polypeptide is selected and/or isolated from a library or repertoire of peptides or polypeptides in which substantially all domains share a common selectable feature. For example, the domain can be selected from a library or repertoire in which substantially all domains bind a common generic ligand, bind a common target ligand, bind (or are bound by) a common antibody, or possess a common catalytic activity. This type of selection is particularly useful for preparing a repertoire of domains that are based on a parental peptide or polypeptide that has a desired biological activity, for example, when performing affinity maturation of an immunoglobulin single variable domain. Selection based on binding to a common generic ligand can yield a collection or population of domains that contain all or substantially all of the domains that were components of the original library or repertoire. For example, domains that bind a target ligand or a generic ligand, such as protein A, protein L or an antibody, can be selected, isolated and/or recovered by panning or using a suitable affinity matrix. Panning can be accomplished by adding a solution of ligand (e.g., generic ligand, target ligand) to a suitable vessel (e.g., tube, petri dish) and allowing the ligand to become deposited or coated onto the walls of the vessel. Excess ligand can be washed away and domains can be added to the vessel and the vessel maintained under conditions suitable for peptides or polypeptides to bind the immobilized ligand. Unbound domains can be washed away and bound domains can be recovered using any suitable method, such as scraping or lowering the pH, for example.

[0274] Suitable ligand affinity matrices generally contain a solid support or bead (e.g., agarose) to which a ligand is covalently or noncovalently attached. The affinity matrix can be combined with peptides or polypeptides (e.g., a repertoire that has been incubated with protease) using a batch process, a column process or any other suitable process under conditions suitable for binding of domains to the ligand on the matrix. domains that do not bind the affinity matrix can be washed away and bound domains can be eluted and recovered using any suitable method, such as elution with a lower pH buffer, with a mild denaturing agent (e.g., urea), or with a peptide or domain that competes for binding to the ligand. In one example, a biotinylated target ligand is combined with a repertoire under conditions suitable for domains in the repertoire to bind the target ligand. Bound domains are recovered using immobilized avidin or streptavidin (e.g., on a bead).

[0275] In some embodiments, the generic or target ligand is an antibody or antigen binding fragment thereof. Antibodies or antigen binding fragments that bind structural features of peptides or polypeptides that are substantially conserved in the peptides or polypeptides of a library or repertoire are particularly useful as generic ligands. Antibodies and antigen binding fragments suitable for use as ligands for isolating, selecting and/or recovering protease resistant peptides or polypeptides can be monoclonal or polyclonal and can be prepared using any suitable method.

### Libraries/Repertoires

[0276] Libraries that encode and/or contain protease epitope binding domains can be prepared or obtained using any suitable method. A library can be designed to encode domains based on a domain or scaffold of interest (e.g., a domain selected from a library) or can be selected from another library using the methods described herein. For example, a library enriched in domains can be prepared using a suitable polypeptide display system.

[0277] Libraries that encode a repertoire of a desired type of domain can readily be produced using any suitable method. For example, a nucleic acid sequence that encodes a desired type of polypeptide (e.g., an immunoglobulin variable domain) can be obtained and a collection of nucleic acids that each contain one or more mutations can be prepared, for example by amplifying the nucleic acid using an error-prone polymerase chain reaction (PCR) system, by chemical mutagenesis (Deng et al., J. Biol. Chem., 269:9533 (1994)) or using bacterial mutator strains (Low et al., J. Mol. Biol., 260:359 (1996)).

[0278] In other embodiments, particular regions of the nucleic acid can be targeted for diversification. Methods for mutating selected positions are also well known in the art and include, for example, the use of mismatched oligonucleotides or degenerate oligonucleotides, with or without the use of PCR. For example, synthetic antibody libraries have been created by targeting mutations to the antigen binding loops. Random or semi-random antibody H3 and L3 regions have been appended to germline immunoblulin V gene segments to produce large libraries with unmutated framework regions (Hoogenboom and Winter (1992) supra; Nissim et al. (1994) supra; Griffiths et al. (1994) supra; DeKruif et al. (1995) supra). Such diversification has been extended to include some or all of the other antigen binding loops (Crameri et al. (1996) Nature Med., 2:100; Riechmann et al. (1995) Bio/Technology, 13:475; Morphosys, WO 97/08320, supra). In other embodiments, particular regions of the nucleic acid can be targeted for diversification by, for example, a two-step PCR strategy employing the product of the first PCR as a “mega-primer.” (See, e.g., Landt, O. et al., Gene 96:125-128 (1990).) Targeted diversification can also be accomplished, for example, by SOE PCR. (See, e.g., Horton, R. M. et al., Gene77:61-68 (1989).)

[0279] Sequence diversity at selected positions can be achieved by altering the coding sequence which specifies the sequence of the polypeptide such that a number of possible amino acids (e.g., all 20 or a subset thereof) can be incorporated at that position. Using the IUPAC nomenclature, the most versatile codon is NNK, which encodes all amino acids as well as the TAG stop codon. The NNK codon may be used in order to introduce the required diversity. Other codons which achieve the same ends are also of use, including the NNN codon, which leads to the production of the additional stop codons TGA and TAA. Such a targeted approach can allow the full sequence space in a target area to be explored.

[0280] Some libraries comprise domains that are members of the immunoglobulin superfamily (e.g., antibodies or portions thereof). For example the libraries can comprise domains that have a known main-chain conformation. (See, e.g., Tomlinson et al., WO 99/20749.) Libraries can be prepared in a suitable plasmid or vector. As used herein, vector refers to a discrete element that is used to introduce heterologous DNA into cells for the expression and/or replication thereof. Any suitable vector can be used, including plasmids (e.g., bacterial plasmids), viral or bacteriophage vectors, artificial chromosomes and episomal vectors. Such vectors may be used for simple cloning and mutagenesis, or an expression vector can be used to drive expression of the library. Vectors and plasmids usually contain one or more cloning sites (e.g., a polylinker), an origin of replication and at least one selectable marker gene. Expression vectors can further contain elements to drive transcription and translation of a polypeptide, such as an enhancer element, promoter, transcription termination signal, signal sequences, and the like. These elements can be arranged in such a way as to be operably linked to a cloned insert encoding a polypeptide, such that the polypeptide is expressed and produced when such an expression vector is maintained under conditions suitable for expression (e.g., in a suitable host cell).

[0281] Cloning and expression vectors generally contain nucleic acid sequences that enable the vector to replicate in one or more selected host cells. Typically in cloning vectors, this sequence is one that enables the vector to replicate independently of the host chromosomal DNA and includes origins of replication or autonomously replicating sequences. Such sequences are well known for a variety of bacteria, yeast and viruses. The origin of replication from the plasmid pBR322 is suitable for most Gram-negative bacteria, the 2 micron plasmid origin is suitable for yeast, and various viral origins (e.g. SV40, adenovirus) are useful for cloning vectors in mammalian cells. Generally, the origin of replication is not needed for mammalian expression vectors, unless these are used in mammalian cells able to replicate high levels of DNA, such as COS cells.

[0282] Cloning or expression vectors can contain a selection gene also referred to as selectable marker. Such marker genes encode a protein necessary for the survival or growth of transformed host cells grown in a selective culture medium. Host cells not transformed with the vector containing the selection gene will therefore not survive in the culture medium. Typical selection genes encode proteins that confer resistance to antibiotics and other toxins, e.g. ampicillin, neomycin, methotrexate or tetracycline, complement auxotrophic deficiencies, or supply critical nutrients not available in the growth media.

[0283] Suitable expression vectors can contain a number of components, for example, an origin of replication, a selectable marker gene, one or more expression control elements, such as a transcription control element (e.g., promoter, enhancer, terminator) and/or one or more translation signals, a signal sequence or leader sequence, and the like. Expression control elements and a signal or leader sequence, if present, can be provided by the vector or other source. For example, the transcriptional and/or translational control sequences of a cloned nucleic acid encoding an antibody chain can be used to direct expression.

[0284] A promoter can be provided for expression in a desired host cell. Promoters can be constitutive or inducible. For example, a promoter can be operably linked to a nucleic acid encoding an antibody, antibody chain or portion thereof, such that it directs transcription of the nucleic acid. A variety of suitable promoters for procaryotic (e.g., the β-lactamase and lactose promoter systems, alkaline phosphatase, the tryptophan (trp) promoter system, lac, tac, T3, T7 promoters for E. coli) and eucaryotic (e.g., simian virus 40 early or late promoter, Rous sarcoma virus long terminal repeat promoter, cytomegalovirus promoter, adenovirus late promoter, EG-1a promoter) hosts are available.

[0285] In addition, expression vectors typically comprise a selectable marker for selection of host cells carrying the vector, and, in the case of a replicable expression vector, an origin of replication. Genes encoding products which confer antibiotic or drug resistance are common selectable markers and may be used in procaryotic (e.g., β-lactamase gene (ampicillin resistance), Tet gene for tetracycline resistance) and eucaryotic cells (e.g., neomycin (G418 or geneticin), gpt (mycophenolic acid), ampicillin, or hygromycin resistance genes). Dihydrofolate reductase marker genes permit selection with methotrexate in a variety of hosts. Genes encoding the gene product of auxotrophic markers of the host (e.g., LEU2, URA3, H/S3) are often used as selectable markers in yeast. Use of viral (e.g., baculovirus) or phage vectors, and vectors which are capable of integrating into the genome of the host cell, such as retroviral vectors, are also contemplated.

[0286] Suitable expression vectors for expression in prokaryotic (e.g., bacterial cells such as E. coli) or mammalian cells include, for example, a pET vector (e.g., pET-12a, pET-36, pET-37, pET-39, pET-40, Novagen and others), a phage vector (e.g., pCANTAB 5 E, Pharmacia), pRIT2T (Protein A fusion vector, Pharmacia), pCDM8, pCDNA1.1/amp, pcDNA3.1, pRc/RSV, pEF-1 (Invitrogen, Carlsbad, Calif.), pCMV-SCRIPT, pFB, pSG5, pXT1 (Stratagene, La Jolla, Calif.), pCDEF3 (Goldman, La., et al., Biotechniques, 21:1013-1015 (1996)), pSVSPORT (GibcoBRL, Rockville, Md.), pEF-Bos (Mizushima, S., et al., Nucleic Acids Res., 18:5322 (1990)) and the like. Expression vectors which are suitable for use in various expression hosts, such as prokaryotic cells (E. coli), insect cells (Drosophila Schnieder S2 cells, Sf9), yeast (P. methanolica, P. pastoris, S. cerevisiae) and mammalian cells (eg, COS cells) are available.

[0287] Some examples of vectors are expression vectors that enable the expression of a nucleotide sequence corresponding to a polypeptide library member. Thus, selection with generic and/or target ligands can be performed by separate propagation and expression of a single clone expressing the polypeptide library member. As described above, a particular selection display system is bacteriophage display. Thus, phage or phagemid vectors may be used, for example vectors may be phagemid vectors which have an E. coli. origin of replication (for double stranded replication) and also a phage origin of replication (for production of single-stranded DNA). The manipulation and expression of such vectors is well known in the art (Hoogenboom and Winter (1992) supra; Nissim et al. (1994) supra). Briefly, the vector can contain a β-lactamase gene to confer selectivity on the phagemid and a lac promoter upstream of an expression cassette that can contain a suitable leader sequence, a multiple cloning site, one or more peptide tags, one or more TAG stop codons and the phage protein pill. Thus, using various suppressor and non-suppressor strains of E. coli and with the addition of glucose, iso-propyl thio-β-D-galactoside (IPTG) or a helper phage, such as VCS M13, the vector is able to replicate as a plasmid with no expression, produce large quantities of the polypeptide library member only or product phage, some of which contain at least one copy of the polypeptide-pIII fusion on their surface.

[0288] Antibody variable domains may comprise a target ligand binding site and/or a generic ligand binding site. In certain embodiments, the generic ligand binding site is a binding site for a superantigen, such as protein A, protein L or protein G. The variable domains can be based on any desired variable domain, for example a human VH (e.g., V_{H} 1a, V_{H} 1 b, V_{H} 2, V_{H} 3, V_{H} 4, V_{H} 5, V_{H} 6), a human Vλ (e.g., VλI, VλII, VλIII, VλIV, VλV, VλVI or Vκ1) or a human Vκ (e.g., Vκ2, Vκ3, Vκ4, Vκ5, Vκ6, Vκ7, Vκ8, Vκ9 or Vκ10).

[0289] A still further category of techniques involves the selection of repertoires in artificial compartments, which allow the linkage of a gene with its gene product. For example, a selection system in which nucleic acids encoding desirable gene products may be selected in microcapsules formed by water-in-oil emulsions is described in WO99/02671, WO00/40712 and Tawfik & Griffiths (1998) Nature Biotechnol 16(7), 652-6. Genetic elements encoding a gene product having a desired activity are compartmentalised into microcapsules and then transcribed and/or translated to produce their respective gene products (RNA or protein) within the microcapsules. Genetic elements which produce gene product having desired activity are subsequently sorted. This approach selects gene products of interest by detecting the desired activity by a variety of means.

### Characterisation of the Epitope Binding Domains.

[0290] The binding of a domain to its specific antigen or epitope can be tested by methods which will be familiar to those skilled in the art and include ELISA. In one example, binding is tested using monoclonal phage ELISA.

[0291] Phage ELISA may be performed according to any suitable procedure: an exemplary protocol is set forth below.

[0292] Populations of phage produced at each round of selection can be screened for binding by ELISA to the selected antigen or epitope, to identify “polyclonal” phage antibodies. Phage from single infected bacterial colonies from these populations can then be screened by ELISA to identify “monoclonal” phage antibodies. It is also desirable to screen soluble antibody fragments for binding to antigen or epitope, and this can also be undertaken by ELISA using reagents, for example, against a C- or N-terminal tag (see for example Winter et al. (1994) Ann. Rev. Immunology 12, 433-55 and references cited therein.

[0293] The diversity of the selected phage monoclonal antibodies may also be assessed by gel electrophoresis of PCR products (Marks et al. 1991, supra; Nissim et al. 1994 supra), probing (Tomlinson et al., 1992) J. Mol. Biol. 227, 776) or by sequencing of the vector DNA.

E. Structure of dAbs

[0294] In the case that the dAbs are selected from V-gene repertoires selected for instance using phage display technology as herein described, then these variable domains comprise a universal framework region, such that is they may be recognised by a specific generic ligand as herein defined. The use of universal frameworks, generic ligands and the like is described in WO99/20749.

[0295] Where V-gene repertoires are used variation in polypeptide sequence may be located within the structural loops of the variable domains. The polypeptide sequences of either variable domain may be altered by DNA shuffling or by mutation in order to enhance the interaction of each variable domain with its complementary pair. DNA shuffling is known in the art and taught, for example, by Stemmer, 1994, Nature 370: 389-391 and U.S. Pat. No. 6,297,053, both of which are incorporated herein by reference. Other methods of mutagenesis are well known to those of skill in the art.

Scaffolds for Use in Constructing dAbs
i. Selection of the Main-Chain Conformation

[0296] The members of the immunoglobulin superfamily all share a similar fold for their polypeptide chain. For example, although antibodies are highly diverse in terms of their primary sequence, comparison of sequences and crystallographic structures has revealed that, contrary to expectation, five of the six antigen binding loops of antibodies (H1, H2, L1, L2, L3) adopt a limited number of main-chain conformations, or canonical structures (Chothia and Lesk (1987) J. Mol. Biol., 196: 901; Chothia et al. (1989) Nature, 342: 877). Analysis of loop lengths and key residues has therefore enabled prediction of the main-chain conformations of H1, H2, L1, L2 and L3 found in the majority of human antibodies (Chothia et al. (1992) J. Mol. Biol., 227: 799; Tomlinson et al. (1995) EMBO J., 14: 4628; Williams et al. (1996) J. Mol. Biol., 264: 220). Although the H3 region is much more diverse in terms of sequence, length and structure (due to the use of D segments), it also forms a limited number of main-chain conformations for short loop lengths which depend on the length and the presence of particular residues, or types of residue, at key positions in the loop and the antibody framework (Martin et al. (1996) J. Mol. Biol., 263: 800; Shirai et al. (1996) FEBS Letters, 399: 1).

[0297] The dAbs are advantageously assembled from libraries of domains, such as libraries of V_{H} domains and/or libraries of V_{L} domains. In one aspect, libraries of domains are designed in which certain loop lengths and key residues have been chosen to ensure that the main-chain conformation of the members is known. Advantageously, these are real conformations of immunoglobulin superfamily molecules found in nature, to minimise the chances that they are non-functional, as discussed above. Germline V gene segments serve as one suitable basic framework for constructing antibody or T-cell receptor libraries; other sequences are also of use. Variations may occur at a low frequency, such that a small number of functional members may possess an altered main-chain conformation, which does not affect its function.

[0298] Canonical structure theory is also of use to assess the number of different main-chain conformations encoded by ligands, to predict the main-chain conformation based on ligand sequences and to chose residues for diversification which do not affect the canonical structure. It is known that, in the human V domain, the L1 loop can adopt one of four canonical structures, the L2 loop has a single canonical structure and that 90% of human V domains adopt one of four or five canonical structures for the L3 loop (Tomlinson et al. (1995) supra); thus, in the V domain alone, different canonical structures can combine to create a range of different main-chain conformations. Given that the V domain encodes a different range of canonical structures for the L1, L2 and L3 loops and that V and V domains can pair with any V_{H} domain which can encode several canonical structures for the H1 and H2 loops, the number of canonical structure combinations observed for these five loops is very large. This implies that the generation of diversity in the main-chain conformation may be essential for the production of a wide range of binding specificities. However, by constructing an antibody library based on a single known main-chain conformation it has been found, contrary to expectation, that diversity in the main-chain conformation is not required to generate sufficient diversity to target substantially all antigens. Even more surprisingly, the single main-chain conformation need not be a consensus structure—a single naturally occurring conformation can be used as the basis for an entire library. Thus, in a one particular aspect, the dAbs possess a single known main-chain conformation.

[0299] The single main-chain conformation that is chosen may be commonplace among molecules of the immunoglobulin superfamily type in question. A conformation is commonplace when a significant number of naturally occurring molecules are observed to adopt it. Accordingly, in one aspect, the natural occurrence of the different main-chain conformations for each binding loop of an immunoglobulin domain are considered separately and then a naturally occurring variable domain is chosen which possesses the desired combination of main-chain conformations for the different loops. If none is available, the nearest equivalent may be chosen. The desired combination of main-chain conformations for the different loops may be created by selecting germline gene segments which encode the desired main-chain conformations. In one example, the selected germline gene segments are frequently expressed in nature, and in particular they may be the most frequently expressed of all natural germline gene segments.

[0300] In designing libraries the incidence of the different main-chain conformations for each of the six antigen binding loops may be considered separately. For H1, H2, L1, L2 and L3, a given conformation that is adopted by between 20% and 100% of the antigen binding loops of naturally occurring molecules is chosen. Typically, its observed incidence is above 35% (i.e. between 35% and 100%) and, ideally, above 50% or even above 65%. Since the vast majority of H3 loops do not have canonical structures, it is preferable to select a main-chain conformation which is commonplace among those loops which do display canonical structures. For each of the loops, the conformation which is observed most often in the natural repertoire is therefore selected. In human antibodies, the most popular canonical structures (CS) for each loop are as follows: H1—CS 1 (79% of the expressed repertoire), H2—CS 3 (46%), L1—CS 2 of V (39%), L2—CS 1 (100%), L3—CS 1 of V (36%) (calculation assumes a κ:λ ratio of 70:30, Hood et al. (1967) Cold Spring Harbor Symp. Quant. Biol., 48: 133). For H3 loops that have canonical structures, a CDR3 length (Kabat et al. (1991) Sequences of proteins of immunological interest, U.S. Department of Health and Human Services) of seven residues with a salt-bridge from residue 94 to residue 101 appears to be the most common. There are at least 16 human antibody sequences in the EMBL data library with the required H3 length and key residues to form this conformation and at least two crystallographic structures in the protein data bank which can be used as a basis for antibody modelling (2cgr and 1tet). The most frequently expressed germline gene segments that this combination of canonical structures are the V_{H} segment 3-23 (DP-47), the J_{H} segment JH4b, the V_{κ} segment O2/O12 (DPK9) and the J_{κ} segment J_{κ}1. V_{H} segments DP45 and DP38 are also suitable. These segments can therefore be used in combination as a basis to construct a library with the desired single main-chain conformation.

[0301] Alternatively, instead of choosing the single main-chain conformation based on the natural occurrence of the different main-chain conformations for each of the binding loops in isolation, the natural occurrence of combinations of main-chain conformations is used as the basis for choosing the single main-chain conformation. In the case of antibodies, for example, the natural occurrence of canonical structure combinations for any two, three, four, five or for all six of the antigen binding loops can be determined. Here, the chosen conformation may be commonplace in naturally occurring antibodies and may be observed most frequently in the natural repertoire. Thus, in human antibodies, for example, when natural combinations of the five antigen binding loops, H1, H2, L1, L2 and L3, are considered, the most frequent combination of canonical structures is determined and then combined with the most popular conformation for the H3 loop, as a basis for choosing the single main-chain conformation.

### Diversification of the Canonical Sequence

[0302] Having selected several known main-chain conformations or a single known main-chain conformation, dAbs can be constructed by varying the binding site of the molecule in order to generate a repertoire with structural and/or functional diversity. This means that variants are generated such that they possess sufficient diversity in their structure and/or in their function so that they are capable of providing a range of activities.

[0303] The desired diversity is typically generated by varying the selected molecule at one or more positions. The positions to be changed can be chosen at random or they may be selected. The variation can then be achieved either by randomisation, during which the resident amino acid is replaced by any amino acid or analogue thereof, natural or synthetic, producing a very large number of variants or by replacing the resident amino acid with one or more of a defined subset of amino acids, producing a more limited number of variants.

[0304] Various methods have been reported for introducing such diversity. Error-prone PCR (Hawkins et al. (1992) J. Mol. Biol., 226: 889), chemical mutagenesis (Deng et al. (1994) J. Biol. Chem., 269: 9533) or bacterial mutator strains (Low et al. (1996) J. Mol. Biol., 260: 359) can be used to introduce random mutations into the genes that encode the molecule. Methods for mutating selected positions are also well known in the art and include the use of mismatched oligonucleotides or degenerate oligonucleotides, with or without the use of PCR. For example, several synthetic antibody libraries have been created by targeting mutations to the antigen binding loops. The H3 region of a human tetanus toxoid-binding Fab has been randomised to create a range of new binding specificities (Barbas et al. (1992) Proc. Natl. Acad. Sci. USA, 89: 4457). Random or semi-random H3 and L3 regions have been appended to germline V gene segments to produce large libraries with unmutated framework regions (Hoogenboom & Winter (1992) J. Mol. Biol., 227: 381; Barbas et al. (1992) Proc. Natl. Acad. Sci. USA, 89: 4457; Nissim et al. (1994) EMBO J., 13: 692; Griffiths et al. (1994) EMBO J., 13: 3245; De Kruif et al. (1995) J. Mol. Biol., 248: 97). Such diversification has been extended to include some or all of the other antigen binding loops (Crameri et al. (1996) Nature Med., 2: 100; Riechmann et al. (1995) Bio/Technology, 13: 475; Morphosys, WO97/08320, supra).

[0305] Since loop randomisation has the potential to create approximately more than 10¹⁵ structures for H3 alone and a similarly large number of variants for the other five loops, it is not feasible using current transformation technology or even by using cell free systems to produce a library representing all possible combinations. For example, in one of the largest libraries constructed to date, 6×10¹⁰ different antibodies, which is only a fraction of the potential diversity for a library of this design, were generated (Griffiths et al. (1994) supra).

[0306] In a one embodiment, only those residues which are directly involved in creating or modifying the desired function of the molecule are diversified. For many molecules, the function will be to bind a target and therefore diversity should be concentrated in the target binding site, while avoiding changing residues which are crucial to the overall packing of the molecule or to maintaining the chosen main-chain conformation.

[0307] In one aspect, libraries of dAbs are used in which only those residues in the antigen binding site are varied. These residues are extremely diverse in the human antibody repertoire and are known to make contacts in high-resolution antibody/antigen complexes. For example, in L2 it is known that positions 50 and 53 are diverse in naturally occurring antibodies and are observed to make contact with the antigen. In contrast, the conventional approach would have been to diversify all the residues in the corresponding Complementarity Determining Region (CDR1) as defined by Kabat et al. (1991, supra), some seven residues compared to the two diversified in the library. This represents a significant improvement in terms of the functional diversity required to create a range of antigen binding specificities.

[0308] In nature, antibody diversity is the result of two processes: somatic recombination of germline V, D and J gene segments to create a naive primary repertoire (so called germline and junctional diversity) and somatic hypermutation of the resulting rearranged V genes. Analysis of human antibody sequences has shown that diversity in the primary repertoire is focused at the centre of the antigen binding site whereas somatic hypermutation spreads diversity to regions at the periphery of the antigen binding site that are highly conserved in the primary repertoire (see Tomlinson et al. (1996) J. Mol. Biol., 256: 813). This complementarity has probably evolved as an efficient strategy for searching sequence space and, although apparently unique to antibodies, it can easily be applied to other polypeptide repertoires. The residues which are varied are a subset of those that form the binding site for the target. Different (including overlapping) subsets of residues in the target binding site are diversified at different stages during selection, if desired.

[0309] In the case of an antibody repertoire, an initial ‘naive’ repertoire is created where some, but not all, of the residues in the antigen binding site are diversified. As used herein in this context, the term “naive” or “dummy” refers to antibody molecules that have no pre-determined target. These molecules resemble those which are encoded by the immunoglobulin genes of an individual who has not undergone immune diversification, as is the case with fetal and newborn individuals, whose immune systems have not yet been challenged by a wide variety of antigenic stimuli. This repertoire is then selected against a range of antigens or epitopes. If required, further diversity can then be introduced outside the region diversified in the initial repertoire. This matured repertoire can be selected for modified function, specificity or affinity.

### EXAMPLES

[0310] The following methods were used in the examples described herein.

### Method 1

### Binding to E. Coli-Expressed Recombinant Human IL-13 by ELISA

[0311] mAb-dAb molecules were assessed for binding to recombinant E. coli-expressed human IL-13 in a direct binding ELISA. In brief, 5 μg/ml recombinant E. coli-expressed human IL-13 (made and purified at GSK) was coated to a 96-well ELISA plate. The wells were blocked for 1 hour at room temperature, mAb-dAb constructs were then titrated out across the plate (usually from around 100 nM in 3-fold dilutions to around 0.01 nM). Binding was detected using approximately 1 μg/ml anti-human kappa light chain peroxidase conjugated antibody (catalogue number A7164, Sigma-Aldrich) or approximately 1 μg/ml anti-human IgG γ chain specific peroxidase conjugated detection antibody (catalogue number A6029, Sigma-Aldrich).

### Method 2

### Binding to E. Coli-Expressed Recombinant Human IL-4 by ELISA

[0312] mAb-dAb constructs were assessed for binding to recombinant E. coli-expressed human IL-4 in a direct binding ELISA. In brief, 5 μg/ml recombinant E. coli-expressed human IL-4 (made and purified at GSK) was coated to a 96-well ELISA plate. The wells were blocked for 1 hour at room temperature, mAb-dAb constructs were then titrated out across the plate (usually from around 100 nM in 3-fold dilutions to around 0.01 nM). Binding was detected using approximately 1 μg/ml anti-human kappa light chain peroxidase conjugated antibody (catalogue number A7164, Sigma-Aldrich) or approximately 1 μg/ml anti-human IgG γ chain specific peroxidase conjugated detection antibody (catalogue number A6029, Sigma-Aldrich).

### Method 3

### Binding to E. Coli-Expressed Recombinant Human IL-18 by ELISA

[0313] mAb-dAb constructs were assessed for binding to recombinant E. coli-expressed human IL-18 in a direct binding ELISA. In brief, 5 μg/ml recombinant E. coli-expressed human IL-18 (made and purified at GSK) was coated to a 96-well ELISA plate. The wells were blocked for 1 hour at room temperature, mAb-dAb constructs were then titrated out across the plate (usually from around 100 nM in 3-fold dilutions to around 0.01 nM). Binding was detected using approximately 1 μg/ml anti-human kappa light chain peroxidase conjugated antibody (catalogue number A7164, Sigma-Aldrich) or approximately 1 μg/ml anti-human IgG γ chain specific peroxidase conjugated detection antibody (catalogue number A6029, Sigma-Aldrich).

### Method 4

### BIAcore™ Binding Affinity Assessment for Binding to E. Coli-Expressed Recombinant Human IL-13

[0314] The binding affinity of mAb-dAb constructs for recombinant E. Coli-expressed human IL-13 were assessed by BIAcore™ analysis. Analyses were carried out using Protein A or anti-human IgG capture. Briefly, Protein A or anti-human IgG was coupled onto a CM5 chip by primary amine coupling in accordance with the manufactures recommendations. mAb-dAb constructs were then captured onto this surface and human IL-13 (made and purified at GSK) passed over at defined concentrations. The surface was regenerated back to the Protein A surface using mild acid elution conditions, this did not significantly affect the ability to capture antibody for a subsequent IL-13 binding event. The work was carried out on BIAcore™ 3000 and T100 machines, data were analysed using the evaluation software in the machines and fitted to the 1:1 model of binding. BIAcore™ runs were carried out at 25° C. or 37° C.

### Method 5

### BIAcore™ Binding Affinity Assessment for Binding to E. Coli-Expressed Recombinant Human IL-4

[0315] The binding affinity of mAb-dAb constructs for recombinant E. Coli-expressed human IL-4 were assessed by BIAcore™ analysis. Analyses were carried out using Protein A or anti-human IgG capture. Briefly, Protein A or anti-human IgG was coupled onto a CM5 chip by primary amine coupling in accordance with the manufactures recommendations. mAb-dAb constructs were then captured onto this surface and human IL-4 (made and purified at GSK) passed over at defined concentrations. The surface was regenerated back to the Protein A surface using mild acid elution conditions, this did not significantly affect the ability to capture antibody for a subsequent IL-4 binding event. The work was carried out on BIAcore™ 3000, T100 and A100 machines, data were analysed using the evaluation software in the machines and fitted to the 1:1 model of binding. BIAcore™ runs were carried out at 25° C. or 37° C.

### Method 6

[0316] BIAcore™ binding affinity assessment for binding to E. Coli-expressed recombinant human IL-18

[0317] The binding affinity of mAb-dAb constructs for recombinant E. Coli-expressed human IL-18 was assessed by BIAcore™ analysis. Analyses were carried out using Protein A or anti-human IgG capture. Briefly, Protein A or anti-human IgG was coupled onto a CM5 chip by primary amine coupling in accordance with the manufactures recommendations. mAb-dAb constructs were then captured onto this surface and human IL-18 (made and purified at GSK) passed over at defined concentrations. The surface was regenerated back to the Protein A surface using mild acid elution conditions, this did not significantly affect the ability to capture antibody for a subsequent IL-18 binding event. The work was carried out on BIAcore™ 3000, T100 and A100 machines, data were analysed using the evaluation software in the machines and fitted to the 1:1 model of binding. The BIAcore™ run was carried out at 25° C.

### Method 7

[0318] Stoichiometry Assessment of mAb-dAb Bispecific Antibodies or Trispecific Antibody for IL-13, IL-4 or IL-18 (Using BIAcore™)

[0319] Anti-human IgG was immobilised onto a CM5 biosensor chip by primary amine coupling. mAb-dAb constructs were captured onto this surface after which a single concentration of IL-13, IL-4 or IL-18 cytokine was passed over, this concentration was enough to saturate the binding surface and the binding signal observed reached full R-max. Stoichiometries were then calculated using the given formula:

Stoich=Rmax*Mw(ligand)/Mw(analyte)*R(ligand immobilised or captured)

[0320] Where the stoichiometries were calculated for more than one analyte binding at the same time, the different cytokines were passed over sequentially at the saturating cytokine concentration and the stoichometries calculated as above. The work was carried out on the Biacore 3000, at 25° C. using HBS-EP running buffer.

### Method 8

### Neutralisation of E. Coli-Expressed Recombinant Human IL-13 in a TF-1 Cell Proliferation Bioassay

[0321] TF-1 cells proliferate in response to a number of different cytokines including human IL-13. The proliferative response of these cells for IL-13 can therefore be used to measure the bioactivity of IL-13 and subsequently an assay has been developed to determine the IL-13 neutralisation potency (inhibition of IL-13 bioactivity) of mAb-dAb constructs.

[0322] The assay was performed in sterile 96-well tissue culture plates under sterile conditions and all test wells were performed in triplicate. Approximately 14 ng/ml recombinant E. Coli-expressed human IL-13 was pre-incubated with various dilutions of mAb-dAb constructs (usually from 200 nM titrated in 3-fold dilutions to 0.02 nM) in a total volume of 50 μl for 1 hour at 37° C. These samples were then added to 50 μl of TF-1 cells (at a concentration of 2×10⁵ cells per ml) in a sterile 96-well tissue culture plate. Thus the final 100 μl assay volume contained various dilutions of mAb-dAb constructs (at a final concentration of 100 nM titrated in 3-fold dilutions to 0.01 nM), recombinant E. Coli-expressed human IL-13 (at a final concentration of 7 ng/ml) and TF-1 cells (at a final concentration of 1×10⁵ cells per ml). The assay plate was incubated at 37° C. for approximately 3 days in a humidified CO₂ incubator. The amount of cell proliferation was then determined using the ‘CellTitre 96® Non-Radioactive Cell Proliferation Assay’ from Promega (catalogue number G4100), as described in the manufacturers instructions. The absorbance of the samples in the 96-well plate was read in a plate reader at 570 nm.

[0323] The capacity of the mAb-dAb constructs to neutralise recombinant E. Coli-expressed human IL-13 bioactivity was expressed as that concentration of the mAb-dAb construct required to neutralise the bioactivity of the defined amount of human IL-13 (7 ng/ml) by 50% (=ND₅₀). The lower the concentration of the mAb-dAb construct required, the more potent the neutralisation capacity.

### Method 9

### Neutralisation of E. Coli-Expressed Recombinant Human IL-4 in a TF-1 Cell Proliferation Bioassay

[0324] TF-1 cells proliferate in response to a number of different cytokines including human IL-4. The proliferative response of these cells for IL-4 can therefore be used to measure the bioactivity of IL-4 and subsequently an assay has been developed to determine the IL-4 neutralisation potency (inhibition of IL-4 bioactivity) of mAb-dAb constructs.

[0325] The assay was performed in sterile 96-well tissue culture plates under sterile conditions and all test wells were performed in triplicate. Approximately 2.2 ng/ml recombinant E. Coli-expressed human IL-4 was pre-incubated with various dilutions of mAb-dAb constructs (usually from 200 nM titrated in 3-fold dilutions to 0.02 nM) in a total volume of 50 μl for 1 hour at 37° C. These samples were then added to 50 μl of TF-1 cells (at a concentration of 2×10⁵ cells per ml) in a sterile 96-well tissue culture plate. Thus the final 100 μl assay volume contained various dilutions of mAb-dAb constructs (at a final concentration of 100 nM titrated in 3-fold dilutions to 0.01 nM), recombinant E. Coli-expressed human IL-4 (at a final concentration of 1.1 ng/ml) and TF-1 cells (at a final concentration of 1×10⁵ cells per ml). The assay plate was incubated at 37° C. for approximately 3 days in a humidified CO₂ incubator. The amount of cell proliferation was then determined using the ‘CellTitre 96® Non-Radioactive Cell Proliferation Assay’ from Promega (catalogue number G4100), as described in the manufacturers instructions. The absorbance of the samples in the 96-well plate was read in a plate reader at 570 nm.

[0326] The capacity of the mAb-dAb constructs to neutralise recombinant E. Coli-expressed human IL-4 bioactivity was expressed as that concentration of the mAb-dAb construct required to neutralise the bioactivity of the defined amount of human IL-4 (1.1 ng/ml) by 50% (=ND₅₀). The lower the concentration of the mAb-dAb construct required, the more potent the neutralisation capacity.

### Method 10

### Neutralisation of E. Coli-Expressed Recombinant Human IL-5 in a TF-1 Cell Proliferation Bioassay

[0327] TF-1 cells proliferate in response to a number of different cytokines including human IL-5. The proliferative response of these cells for IL-5 can therefore be used to measure the bioactivity of IL-5 and subsequently an assay has been developed to determine the IL-5 neutralisation potency (inhibition of IL-5 bioactivity) of mAb-dAb constructs.

[0328] The assay was performed in sterile 96-well tissue culture plates under sterile conditions and all test wells were performed in triplicate. Approximately Xng/ml recombinant E. Coli-expressed human IL-5 was pre-incubated with various dilutions of mAb-dAb constructs (usually from 200 nM titrated in 3-fold dilutions to 0.02 nM) in a total volume of 50 μl for 1 hour at 37° C. These samples were then added to 50 μl of TF-1 cells (at a concentration of 2×10⁵ cells per ml) in a sterile 96-well tissue culture plate. Thus the final 100 μl assay volume contained various dilutions of mAb-dAb constructs (at a final concentration of 100 nM titrated in 3-fold dilutions to 0.01 nM), recombinant E. Coli-expressed human IL-5 (at a final concentration of Xng/ml) and TF-1 cells (at a final concentration of 1×10⁵ cells per ml). The assay plate was incubated at 37° C. for approximately 3 days in a humidified CO₂ incubator. The amount of cell proliferation was then determined using the ‘CellTitre 96® Non-Radioactive Cell Proliferation Assay’ from Promega (catalogue number G4100), as described in the manufacturers instructions. The absorbance of the samples in the 96-well plate was read in a plate reader at 570 nm.

[0329] The capacity of the mAb-dAb constructs to neutralise recombinant E. Coli-expressed human IL-5 bioactivity was expressed as that concentration of the mAb-dAb construct required to neutralise the bioactivity of the defined amount of human IL-5 (Xng/ml) by 50% (=ND₅₀). The lower the concentration of the mAb-dAb construct required, the more potent the neutralisation capacity.

### Method 11

### Dual Neutralisation of E. Coli-Expressed Recombinant Human IL-13 and E. Coli-Expressed Recombinant Human IL-4 in a TF-1 Cell Proliferation Bioassay

[0330] TF-1 cells proliferate in response to a number of different cytokines including human IL-13 and human IL-4. The proliferative response of these cells for IL-13 and IL-4 can therefore be used to measure the bioactivity of IL-13 and IL-4 simultaneously and subsequently an assay has been developed to determine the dual IL-13 and IL-4 neutralisation potency (dual inhibition of IL-13 and IL-4 bioactivity) of mAb-dAb constructs.

[0331] The assay was performed in sterile 96-well tissue culture plates under sterile conditions and all test wells were performed in triplicate. Approximately 14 ng/ml recombinant E. Coli-expressed human IL-13 and approximately 2.2 ng/ml recombinant E. Coli-expressed human IL-4 were pre-incubated with various dilutions of mAb-dAb constructs (usually from 200 nM titrated in 3-fold dilutions to 0.02 nM) in a total volume of 50 μl for 1 hour at 37° C. These samples were then added to 50 μl of TF-1 cells (at a concentration of 2×10⁵ cells per ml) in a sterile 96-well tissue culture plate. Thus the final 100 μl assay volume, contained various dilutions of mAb-dAb constructs (at a final concentration of 100 nM titrated in 3-fold dilutions to 0.01 nM), recombinant E. Coli-expressed human IL-13 (at a final concentration of 7 ng/ml), recombinant E. Coli-expressed human IL-4 (at a final concentration of 1.1 ng/ml) and TF-1 cells (at a final concentration of 1×10⁵ cells per ml). The assay plate was incubated at 37° C. for approximately 3 days in a humidified CO₂ incubator. The amount of cell proliferation was then determined using the ‘CellTitre 96® Non-Radioactive Cell Proliferation Assay’ from Promega (catalogue number G4100), as described in the manufacturers instructions. The absorbance of the samples in the 96-well plate was read in a plate reader at 570 nm.

### Method 12

### BIAcore™ Binding Affinity Assessment for Binding to Sf21-Expressed Recombinant Human IL-5

[0332] The binding affinity of mAb-dAb molecules for recombinant Sf21-expressed human IL-5 was assessed by BIAcore™ analysis. Analyses were carried out using Protein A or anti-human IgG capture. Briefly, Protein A or anti-human IgG was coupled onto a CM5 chip by primary amine coupling in accordance with the manufactures recommendations. mAb-dAb molecules were then captured onto this surface and human IL-5 (made and purified at GSK) passed over at defined concentrations. The surface was regenerated back to the Protein A surface using mild acid elution conditions, this did not significantly affect the ability to capture antibody for a subsequent IL-5 binding event. The work was carried out on BIAcore™ 3000, T100 and A100 machines, data were analysed using the evaluation software in the machines and fitted to the 1:1 model of binding. The BIAcore™ run was carried out at 25° C.

### Example 1

### 1. Generation of Bispecific mAb-dAbs

[0333] Bispecific mAb-dAbs were constructed by grafting a domain antibody onto the C-terminal end of the heavy chain or the light chain (or both) of a monoclonal antibody. Linker sequences were used to join the domain antibody to heavy chain CH3 or light chain CK. A schematic diagram of these mAb-dAb constructs is shown in FIG. 8 (the mAb heavy chain is drawn in grey; the mAb light chain is drawn in white; the dAb is drawn in black).

[0334] An example of mAb-dAb type 1 would be PascoH-G4S-474. An example of mAb-dAb type 2 would be PascoL-G4S-474. An example of mAb-dAb type 3 would be PascoHL-G4S-474. mAb-dAb types 1 and 2 are tetravalent constructs, mAb-dAb type 3 is a hexavalent construct.

[0335] A schematic diagram illustrating the construction of a mAb-dAb heavy chain (top illustration) or a mAb-dAb light chain (bottom illustration) is shown in FIG. 178.

[0336] [For the heavy chain: ‘V_{H}’ is the monoclonal antibody variable heavy chain sequence; ‘CH1, CH2 and CH3’ are human IgG1 heavy chain constant region sequences; ‘linker’ is the sequence of the specific linker region used; ‘dAb’ is the domain antibody sequence. For the light chain: ‘V_{L}’ is the monoclonal antibody variable light chain sequence; ‘CK’ is the human light chain constant region sequence; ‘linker’ is the sequence of the specific linker region used; ‘dAb’ is the domain antibody sequence].

[0337] These constructs (mAb-dAb heavy or light chains) were cloned into mammalian expression vectors using standard molecular biology techniques. A human amino acid signal sequence (as shown in sequence ID number 62) was used in the construction of these constructs. The expression vectors used to generate the mAb-dAb heavy chain or the mAb-dAb light chain were the same as those routinely used for monoclonal antibody heavy chain expression or monoclonal antibody light chain expression.

[0338] For expression of mAb-dAbs where the dAb was grafted onto the C-terminal end of the heavy chain of the monoclonal antibody, the appropriate heavy chain mAb-dAb expression vector was paired with the appropriate light chain expression vector for that monoclonal antibody.

[0339] For expression of mAb-dAbs where the dAb was grafted onto the C-terminal end of the light chain of the monoclonal antibody, the appropriate light chain mAb-dAb expression vector was paired with the appropriate heavy chain expression vector for that monoclonal antibody.

[0340] For expression of mAb-dAbs where the dAb was grafted onto the C-terminal end of the heavy chain of the monoclonal antibody and where the dAb was grafted onto the C-terminal end of the light chain of the monoclonal antibody, the appropriate heavy chain mAb-dAb expression vector was paired with the appropriate light chain mAb-dAb expression vector.

### 1.1 Nomenclature and Abbreviations Used

[0341] Monoclonal antibody (mAb)
Monoclonal antibodies (mAbs)
Domain antibody (dAb)
Domain antibodies (dAbs)
Heavy Chain (H chain)
Light chain (L chain)
Heavy chain variable region (V_{H})
Light chain variable region (V_{L})
Human IgG1 constant heavy region 1 (CH1)
Human IgG1 constant heavy region 2 (CH2)
Human IgG1 constant heavy region 3 (CH3)
Human kappa light chain constant region (CK)

### 1.2 Anti-IL13mAb-Anti-IL4dAbs

[0342] Bispecific anti-IL13mAb-anti-IL4dAbs were constructed by grafting anti-human IL-4 domain antibodies onto the heavy chain or the light chain of an anti-human IL-13 humanised monoclonal antibody. Four different anti-human IL-4 domain antibodies were tested in this format. Different linkers (or no linker) were used to join the anti-IL4 domain antibodies to the monoclonal antibody.

[0343] Note that a BamH1 cloning site (which codes for amino acid residues G and S) was used to clone the linkers and dAbs either to CH3 of the mAb heavy chain or to CK of the mAb light chain. Thus in addition to the given linker sequence, additional G and S amino acid residues are present between the linker sequence and the domain antibody for both heavy chain and light chain expression constructs or between CH3 and the linker sequence in some but not all heavy chain expression constructs. However, when the G4S linker was placed between the mAb and dAb in the mAb-dAb format, the BamH1 cloning site was already present (due to the G and S amino acid residues inherent within the G4S linker sequence) and thus additional G and S amino acid residues were not present between CH3 or CK and the domain antibody. When no linker sequence was between the mAb and dAb in the mAb-dAb format, the BamH1 cloning site (and hence the G and S amino acid residues) was still present between CH3 or CK and the domain antibody. Full details on the amino acid sequences of mAb-dAb heavy and light chains are given in sequence identification numbers 16 to 59 (inclusive).

[0344] The following mAb-dAbs (set out in table 1) were expressed transiently in CHOK1 cell supernatants. Following mAb-dAb quantification these mAb-dAb containing supernatants were analysed for activity in IL-13 and IL-4 binding ELISAs.

TABLE 1

| Name | Description | Sequence ID No. |
|---|---|---|
| 586H-25 | H chain = Anti-human IL-13 mAb heavy chain- | 16 (=H chain) |
| | DOM9-155-25 dAb | 13 (=L chain) |
| | L chain = Anti-human IL-13 mAb light chain | |
| 586H-G4S-25 | H chain = Anti-human IL-13 mAb heavy chain-G4S | 20 (=H chain) |
| | linker-DOM9-155-25 dAb | 13 (=L chain) |
| | L chain = Anti-human IL-13 mAb light chain | |
| 586H-TVAAPS-25 | H chain = Anti-human IL-13 mAb heavy chain- | 24 (=H chain) |
| | TVAAPS linker-DOM9-155-25 dAb | 13 (=L chain) |
| | L chain = Anti-human IL-13 mAb light chain | |
| 586H-ASTKG-25 | H chain = Anti-human IL-13 mAb heavy chain- | 28 (=H chain) |
| | ASTKGPT linker-DOM9-155-25 dAb | 13 (=L chain) |
| | L chain = Anti-human IL-13 mAb light chain | |
| 586H-EPKSC-25 | H chain = Anti-human IL-13 mAb heavy chain- | 32 (=H chain) |
| | EPKSCDKTHTCPPCP linker-DOM9-155-25 dAb | 13 (=L chain) |
| | L chain = Anti-human IL-13 mAb light chain | |
| 586H-ELQLE-25 | H chain = Anti-human IL-13 mAb heavy chain- | 36 (=H chain) |
| | ELQLEESCAEAQDGELDG linker-DOM9-155-25 | 13 (=L chain) |
| | dAb | |
| | L chain = Anti-human IL-13 mAb light chain | |
| 586H-147 | H chain = Anti-human IL-13 mAb heavy chain- | 17 (=H chain) |
| | DOM9-155-147 dAb | 13 (=L chain) |
| | L chain = Anti-human IL-13 mAb light chain | |
| 586H-G4S-147 | H chain = Anti-human IL-13 mAb heavy chain-G4S | 21 (=H chain) |
| | linker-DOM9-155-147 dAb | 13 (=L chain) |
| | L chain = Anti-human IL-13 mAb light chain | |
| 586H-TVAAPS-147 | H chain = Anti-human IL-13 mAb heavy chain- | 25 (=H chain) |
| | TVAAPS linker-DOM9-155-147 dAb | 13 (=L chain) |
| | L chain = Anti-human IL-13 mAb light chain | |
| 586H-ASTKG-147 | H chain = Anti-human IL-13 mAb heavy chain- | 29 (=H chain) |
| | ASTKGPT linker-DOM9-155-147 dAb | 13 (=L chain) |
| | L chain = Anti-human IL-13 mAb light chain | |
| 586H-EPKSC-147 | H chain = Anti-human IL-13 mAb heavy chain- | 33 (=H chain) |
| | EPKSCDKTHTCPPCP linker-DOM9-155-147 dAb | 13 (=L chain) |
| | L chain = Anti-human IL-13 mAb light chain | |
| 586H-ELQLE-147 | H chain = Anti-human IL-13 mAb heavy chain- | 37 (=H chain) |
| | ELQLEESCAEAQDGELDG linker-DOM9-155-147 | 13 (=L chain) |
| | dAb | |
| | L chain = Anti-human IL-13 mAb light chain | |
| 586H-154 | H chain = Anti-human IL-13 mAb heavy chain- | 18 (=H chain) |
| | DOM9-155-154 dAb | 13 (=L chain) |
| | L chain = Anti-human IL-13 mAb light chain | |
| 586H-G4S-154 | H chain = Anti-human IL-13 mAb heavy chain-G4S | 22 (=H chain) |
| | linker-DOM9-155-154 dAb | 13 (=L chain) |
| | L chain = Anti-human IL-13 mAb light chain | |
| 586H-TVAAPS-154 | H chain = Anti-human IL-13 mAb heavy chain- | 26 (=H chain) |
| | TVAAPS linker-DOM9-155-154 dAb | 13 (=L chain) |
| | L chain = Anti-human IL-13 mAb light chain | |
| 586H-ASTKG-154 | H chain = Anti-human IL-13 mAb heavy chain- | 30 (=H chain) |
| | ASTKGPT linker-DOM9-155-154 dAb | 13 (=L chain) |
| | L chain = Anti-human IL-13 mAb light chain | |
| 586H-EPKSC-154 | H chain = Anti-human IL-13 mAb heavy chain- | 34 (=H chain) |
| | EPKSCDKTHTCPPCP linker-DOM9-155-154 dAb | 13 (=L chain) |
| | L chain = Anti-human IL-13 mAb light chain | |
| 586H-ELQLE-154 | H chain = Anti-human IL-13 mAb heavy chain- | 38 (=H chain) |
| | ELQLEESCAEAQDGELDG linker-DOM9-155-154 | 13 (=L chain) |
| | dAb | |
| | L chain = Anti-human IL-13 mAb light chain | |
| 586H-210 | H chain = Anti-human IL-13 mAb heavy chain- | 19 (=H chain) |
| | DOM9-112-210 dAb | 13 (=L chain) |
| | L chain = Anti-human IL-13 mAb light chain | |
| 586H-G4S-210 | H chain = Anti-human IL-13 mAb heavy chain-G4S | 23 (=H chain) |
| | linker-DOM9-112-210 dAb | 13 (=L chain) |
| | L chain = Anti-human IL-13 mAb light chain | |
| 586H-TVAAPS-210 | H chain = Anti-human IL-13 mAb heavy chain- | 27 (=H chain) |
| | TVAAPS linker-DOM9-112-210 dAb | 13 (=L chain) |
| | L chain = Anti-human IL-13 mAb light chain | |
| 586H-ASTKG-210 | H chain = Anti-human IL-13 mAb heavy chain- | 31 (=H chain) |
| | ASTKGPT linker-DOM9-112-210 dAb | 13 (=L chain) |
| | L chain = Anti-human IL-13 mAb light chain | |
| 586H-EPKSC-210 | H chain = Anti-human IL-13 mAb heavy chain- | 35 (=H chain) |
| | EPKSCDKTHTCPPCP linker-DOM9-112-210 dAb | 13 (=L chain) |
| | L chain = Anti-human IL-13 mAb light chain | |
| 586H-ELQLE-210 | H chain = Anti-human IL-13 mAb heavy chain- | 39 (=H chain) |
| | ELQLEESCAEAQDGELDG linker-DOM9-112-210 | 13 (=L chain) |
| | dAb | |
| | L chain = Anti-human IL-13 mAb light chain | |
| 586H | H chain = Anti-human IL-13 mAb heavy chain | 40 (=H chain) |
| | L chain = Anti-human IL-13 mAb light chain | 13 (=L chain) |
| 586H-ASTKG | H chain = Anti-human IL-13 mAb heavy chain- | 41 (=H chain) |
| | ASTKGPT linker | 13 (=L chain) |
| | L chain = Anti-human IL-13 mAb light chain | |
| 586H-EPKSC | H chain = Anti-human IL-13 mAb heavy chain- | 42 (=H chain) |
| | EPKSCDKTHTCPPCP linker | 13 (=L chain) |
| | L chain = Anti-human IL-13 mAb light chain | |
| 586H-ELQLE | H chain = Anti-human IL-13 mAb heavy chain- | 43 (=H chain) |
| | ELQLEESCAEAQDGELDG linker | 13 (=L chain) |
| | L chain = Anti-human IL-13 mAb light chain | |

[0345] The following mAb-dAbs (table 2) were expressed transiently in CHOK1 or CHOE1a cell supernatants, purified and analysed in a number of IL-13 and IL-4 activity assays.

TABLE 2

| Name | Description | Sequence ID No. |
|---|---|---|
| 586H- | H chain = Anti-human IL-13 mAb | 24 (=H chain) |
| TVAAPS-25 | heavy chain-TVAAPS linker- | 13 (=L chain) |
| | DOM9-155-25 dAb | |
| | L chain = Anti-human IL-13 mAb | |
| | light chain | |
| 586H- | H chain = Anti-human IL-13 mAb | 26 (=H chain) |
| TVAAPS-154 | heavy chain-TVAAPS linker- | 13 (=L chain) |
| | DOM9-155-154 dAb | |
| | L chain = Anti-human IL-13 mAb | |
| | light chain | |
| 586H- | H chain = Anti-human IL-13 mAb | 27 (=H chain) |
| TVAAPS-210 | heavy chain-TVAAPS linker- | 13 (=L chain) |
| | DOM9-112-210 dAb | |
| | L chain = Anti-human IL-13 mAb | |
| | light chain | |

### 1.3 Anti-IL4mAb-Anti-IL13dAbs

[0346] Bispecific anti-IL4mAb-anti-IL13dAbs were constructed by grafting an anti-human IL-13 domain antibody onto the heavy chain or the light chain or both heavy and light chains of an anti-human IL-4 humanised monoclonal antibody. Only one anti-human IL-13 domain antibody was tested in this format. Different linkers (or no linker) were used to join the anti-IL13 domain antibody to the monoclonal antibody.

[0347] Note that a BamH1 cloning site (which codes for amino acid residues G and S) was used to clone the linkers and dAbs either to CH3 of the mAb heavy chain or to CK of the mAb light chain. Thus in addition to the given linker sequence, additional G and S amino acid residues are present between the linker sequence and the domain antibody for both heavy chain and light chain expression constructs or between CH3 and the linker sequence in some but not all heavy chain expression constructs. However, when the G4S linker was placed between the mAb and dAb in the mAb-dAb format, the BamH1 cloning site was already present (due to the G and S amino acid residues inherent within the G4S linker sequence) and thus additional G and S amino acid residues were not present between CH3 or CK and the domain antibody. When no linker sequence was between the mAb and dAb in the mAb-dAb format, the BamH1 cloning site (and hence the G and S amino acid residues) was still present between CH3 or CK and the domain antibody. Full details on the amino acid sequences of mAb-dAb heavy and light chains are given in sequence identification numbers 16 to 59 (inclusive).

[0348] The following mAb-dAbs (table 3) were expressed transiently in CHOK1 cell supernatants. Following mAb-dAb quantification these mAb-dAb containing supernatants were analysed for activity in IL-13 and IL-4 binding ELISAs.

TABLE 3

| Name | Description | Sequence ID No. |
|---|---|---|
| PascoH- | H chain = Pascolizumab heavy chain- | 48 (=H chain) |
| 474 | DOM10-53-474 dAb | 15 (=L chain) |
| | L chain = Pascolizumab light chain | |
| PascoH- | H chain = Pascolizumab heavy chain- | 49 (=H chain) |
| G4S-474 | G4S linker-DOM10-53-474 dAb | 15 (=L chain) |
| | L chain = Pascolizumab light chain | |
| PascoH- | H chain = Pascolizumab heavy chain- | 50 (=H chain) |
| TVAAPS-474 | TVAAPS linker-DOM10-53-474 dAb | 15 (=L chain) |
| | L chain = Pascolizumab light chain | |
| PascoH- | H chain = Pascolizumab heavy chain- | 51 (=H chain) |
| ASTKG-474 | ASTKGPT linker-DOM10-53- | 15 (=L chain) |
| | 474 dAb | |
| | L chain = Pascolizumab light chain | |
| PascoH- | H chain = Pascolizumab heavy chain- | 52 (=H chain) |
| EPKSC-474 | EPKSCDKTHTCPPCP | 15 (=L chain) |
| | linker-DOM10-53-474 dAb | |
| | L chain = Pascolizumab light chain | |
| PascoH- | H chain = Pascolizumab heavy chain- | 53 (=H chain) |
| ELQLE-474 | ELQLEESCAEAQDGELDG | 15 (=L chain) |
| | linker-DOM10-53-474 dAb | |
| | L chain = Pascolizumab light chain | |
| PascoL- | H chain = Pascolizumab heavy chain | 14 (=H chain) |
| 474 | L chain = Pascolizumab light chain- | 54 (=L chain) |
| | DOM10-53-474 dAb | |
| PascoL- | H chain = Pascolizumab heavy chain | 14 (=H chain) |
| G4S-474 | L chain = Pascolizumab light chain- | 55 (=L chain) |
| | G4S linker-DOM10-53-474 dAb | |
| PascoL- | H chain = Pascolizumab heavy chain | 14 (=H chain) |
| TVAAPS-474 | L chain = Pascolizumab light chain- | 56 (=L chain) |
| | TVAAPS linker-DOM10-53-474 dAb | |
| PascoL- | H chain = Pascolizumab heavy chain | 14 (=H chain) |
| ASTKG-474 | L chain = Pascolizumab light chain- | 57 (=L chain) |
| | ASTKGPT linker-DOM10-53- | |
| | 474 dAb | |
| PascoL- | H chain = Pascolizumab heavy chain | 14 (=H chain) |
| EPKSC-474 | L chain = Pascolizumab light chain- | 58 (=L chain) |
| | EPKSCDKTHTCPPCP | |
| | linker-DOM10-53-474 dAb | |
| PascoL- | H chain = Pascolizumab heavy chain | 14 (=H chain) |
| ELQLE-474 | L chain = Pascolizumab light chain- | 59 (=L chain) |
| | ELQLEESCAEAQDGELDG | |
| | linker-DOM10-53-474 dAb | |

[0349] The following mAb-dAbs (Table 4) were expressed transiently in CHOK1 or CHOE1a cell supernatants, purified and analysed in a number of IL-13 and IL-4 activity assays.

TABLE 4

| Name | Description | Sequence ID No. |
|---|---|---|
| PascoH- | H chain = Pascolizumab heavy chain- | 49 (=H chain) |
| G4S-474 | G4S linker-DOM10-53-474 dAb | 15 (=L chain) |
| | L chain = Pascolizumab light chain | |
| PascoH- | H chain = Pascolizumab heavy chain- | 48 (=H chain) |
| 474 | DOM10-53-474 dAb | 15 (=L chain) |
| | L chain = Pascolizumab light chain | |
| PascoL- | H chain = Pascolizumab heavy chain | 14 (=H chain) |
| G4S-474 | L chain = Pascolizumab light chain- | 55 (=L chain) |
| | G4S linker-DOM10-53-474 dAb | |
| PascoHL- | H chain = Pascolizumab heavy chain- | 49 (=H chain) |
| G4S-474 | G4S linker-DOM10-53-474 dAb | 55 (=L chain) |
| | L chain = Pascolizumab light chain- | |
| | G4S linker-DOM10-53-474 dAb | |

### 1.4 Sequence ID Numbers for Monoclonal Antibodies, Domain Antibodies and Linkers

[0350] Sequence IDs numbers for the monoclonal antibodies (mAb), domain antibodies (dAb) and linkers used to generate the mAb-dAbs are shown below in table 5.

TABLE 5

| | | Sequence |
|---|---|---|
| Name | Specificity | ID |
| Anti-human IL-13 | Human IL-13 | 12 |
| monoclonal | | (H chain) |
| antibody | | 13 |
| | | (L chain) |
| Anti-human IL-4 | Human IL-4 | 14 |
| monoclonal | | (H chain) |
| antibody | | 15 |
| (also known as | | (L chain) |
| Pascolizumab) | | |
| DOM10-53-474 | Human IL-13 | 5 |
| domain antibody | | |
| DOM9-112-210 | Human IL-4 | 1 |
| domain antibody | | |
| DOM9-155-25 | Human IL-4 | 2 |
| domain antibody | | |
| DOM9-155-147 | Human IL-4 | 3 |
| domain antibody | | |
| DOM9-155-154 | Human IL-4 | 4 |
| domain antibody | | |
| ASTKGPS | Derived from | 9 |
| linker sequence | human IgG1 | |
| | H chain (VH-CH1) | |
| ASTKGPT | Derived from | 8 |
| linker sequence | human IgG1 | |
| | H chain (VH-CH1), | |
| | where the last | |
| | amino acid resi- | |
| | due in the native | |
| | sequence (S) has | |
| | been substituted | |
| | for T | |
| EPKSCDKTHTCPPCP | Derived from | 10 |
| linker sequence | human IgG1 | |
| | H chain | |
| | (CH1-CH2) | |
| TVAAPS | Derived from | 7 |
| linker sequence | human K L | |
| | chain (VL-CK) | |
| ELQLEESCAEAQDGELDG | Derived from | 11 |
| linker sequence | human IgG1 | |
| | CH3 tether | |
| GGGGS | A published | 6 |
| linker sequence | linker | |
| | sequence | |

[0351] Mature human IL-13 amino acid sequence (without signal sequence) is given in sequence ID number 64.

[0352] Mature human IL-4 amino acid sequence (without signal sequence) is given in sequence ID number 63.

1.5 Expression and Purification of mAb-dAbs

[0353] DNA sequences encoding mAb-dAb constructs were cloned into mammalian expression vectors using standard molecular biology techniques. The mAb-dAb expression constructs were transiently transfected into CHOK1 or CHOE1a cells, expressed at small (approximately 3 mls) or medium (approximately 1 litre) scale and then purified (where required) using immobilised Protein A. The expression and purification procedures used to generate the mAb-dAbs were the same as those routinely used to express and purify monoclonal antibodies.

[0354] The mAb-dAb construct in the CHO cell supernatant was quantified in a human IgG quantification ELISA. The mAb-dAb containing CHO cell supernatants were then analysed for activity in IL-13 and IL-4 binding ELISAs and/or binding affinity for IL-13 and IL-4 by surface plasmon resonance (using BIAcore™)

[0355] Selected mAb-dAb constructs were purified using immobilised Protein A columns, quantified by reading absorbance at 280 nm and analysed in detail in a number of IL-13 and IL-4 activity assays.

1.6 Size Exclusion Chromatography Analyses of Purified mAb-dAbs

[0356] PascoH-G4S-474, PascoL-G4S-474, PascoH-474 and PascoHL-G4S-474 purified mAb dAbs were analysed by size exclusion chromatography (SEC) and sodium dodecyl sulphate poly acrylamide gel electrophoresis (SDS PAGE). These data are illustrated in FIGS. 9, 10, 11 and 12.

### Example 2

### Binding of mAb-dAbs to Recombinant E. Coli-Expressed Human IL-13 and Recombinant E. Coli-Expressed Human IL-4 by ELISA

### 2.1 Binding of Anti-IL13mAb-Anti-IL4dAbs to IL-13 and IL-4

[0357] Anti-IL13mAb-anti-IL4dAb containing CHO cell supernatants prepared as described in section 1.5, were tested for binding to recombinant E. Coli-expressed human IL-13 in a direct binding ELISA (as described in method 1). These data are illustrated in FIG. 13.

[0358] The purpose of this figure is to illustrate that all of these anti-IL13mAb-anti-IL4dAbs bound IL-13. The binding activity of these mAb-dAbs was also approximately equivalent (within 2-fold to 3-fold) to purified anti-human IL13 mAb alone, which was included in this assay as a positive control for IL-13 binding and in order to directly compare to the mAb-dAbs. Purified anti-human IL4 mAb (Pascolizumab) was included as a negative control for IL-13 binding.

[0359] These same mAb-dAb containing CHO cell supernatants prepared as described in section 1.5, were also tested for binding to recombinant E. Coli-expressed human IL-4 in a direct binding ELISA (as described in method 2). These data are illustrated in FIG. 14.

[0360] The purpose of this figure is to illustrate that all of these anti-IL13mAb-anti-IL4dAbs bound IL-4, but some variation in IL-4 binding activity was observed. No binding to IL-4 was observed when no anti-IL4 dAb was present in the mAb-dAb construct. Purified anti-human IL13 mAb was also included as a negative control for binding to IL-4. Note that the anti-IL-4 dAbs alone were not tested in this assay as the dAbs are not detected by the secondary detection antibody; instead, purified anti-human IL4 mAb (Pascolizumab) was used as a positive control to demonstrate IL-4 binding in this assay.

[0361] The purified anti-IL13mAb-anti-IL4dAbs, 586H-TVAAPS-25, 586H-TVAAPS-154 and 586H-TVAAPS-210, were also tested for binding to recombinant E. Coli-expressed human IL-13 in a direct binding ELISA (as described in method 1). These data are illustrated in FIG. 15.

[0362] These purified anti-IL13mAb-anti-IL4dAbs bound IL-13. The binding activity of these mAb-dAbs for IL-13 was equivalent to that of purified anti-human IL13 mAb alone. An isotype-matched mAb (with specificity for an irrelevant antigen) was also included as a negative control for binding to IL-13 in this assay.

[0363] These same purified anti-IL13mAb-anti-IL4dAbs, 586H-TVAAPS-25, 586H-TVAAPS-154 and 586H-TVAAPS-210, were also tested for binding to recombinant E. Coli-expressed human IL-4 in a direct binding ELISA (as described in method 2). These data are illustrated in FIG. 16.

[0364] All of these anti-IL13mAb-anti-IL4dAbs bound IL-4. Note that the anti-IL-4 dAbs alone were not tested in this assay as the dAbs are not detected by the secondary detection antibody; instead, purified anti-human IL4 mAb (Pascolizumab) was used as a positive control to demonstrate IL-4 binding in this assay. An isotype-matched mAb (with specificity for an irrelevant antigen) was also included as a negative control for binding to IL-4 in this assay.

### 2.2 Binding of Anti-IL4mAb-Anti-IL13dAbs to IL-13 and IL-4

[0365] Anti-IL4mAb-anti-IL13dAb containing CHO cell supernatants prepared as described in section 1.5, were tested for binding to recombinant E. Coli-expressed human IL-4 in a direct binding ELISA (as described in method 2). These data are illustrated in FIG. 17 (some samples were prepared and tested in duplicate and this has been annotated as sample 1 and sample 2).

[0366] The purpose of this figure is to illustrate that all of these anti-IL4mAb-anti-IL13dAbs bound IL-4. Purified anti-human IL4 mAb alone (Pascolizumab) was included in this assay but did not generate a binding curve as an error was made when diluting this mAb for use in the assay (Pascolizumab has been used successfully in all other subsequent IL-4 binding ELISAs). Purified anti-human IL13 mAb was included as a negative control for IL-4 binding.

[0367] These same mAb-dAb containing CHO cell supernatants prepared as described in section 1.5, were also tested for binding to recombinant E. Coli-expressed human IL-13 in a direct binding ELISA (as described in method 1). These data are illustrated in FIG. 18 (some samples were prepared and tested in duplicate and this has been annotated as sample 1 and sample 2).

[0368] The purpose of this figure is to illustrate that all of these anti-IL4mAb-anti-IL13dAbs bound IL-13. Purified anti-human IL13 mAb alone was included in this assay but did not generate a binding curve as an error was made when diluting this mAb for use in the assay (purified anti-human IL13 mAb has been used successfully in all other subsequent IL-13 binding ELISAs). Purified anti-IL4 mAb (Pascolizumab) was included as a negative control for binding to IL-13. Note that the anti-IL-13 dAb alone (DOM10-53-474) was not tested in this assay as this dAb is not detected by the secondary detection antibody.

[0369] The purified anti-IL4mAb-anti-IL13dAbs, PascoH-G4S-474, PascoH-474, PascoL-G4S-474 and PascoHL-G4S-474, were also tested for binding to recombinant E. Coli-expressed human IL-4 in a direct binding ELISA (as described in method 2). These data are illustrated in FIG. 19

[0370] These purified anti-IL4mAb-anti-IL13dAbs bound IL-4. The binding activity of these mAb-dAbs was approximately equivalent (within 2-fold) to purified anti-IL4 mAb alone (Pascolizumab). An isotype-matched mAb (with specificity for an irrelevant antigen) was also included as a negative control for binding to IL-4 in this assay.

[0371] These same purified anti-IL4mAb-anti-IL13dAbs, PascoH-G4S-474, PascoH-474, PascoL-G4S-474 and PascoHL-G4S-474, were also tested for binding to recombinant E. Coli-expressed human IL-13 in a direct binding ELISA (as described in method 1). These data are illustrated in FIG. 20.

[0372] These purified anti-IL4mAb-anti-IL13dAbs bound IL-13. An isotype-matched mAb (with specificity for an irrelevant antigen) was also included as a negative control for binding to IL-13 in this assay. Note that the anti-IL-13 dAb alone (DOM10-53-474) was not tested in this assay as the dAb is not detected by the secondary detection antibody; instead, the anti-human IL13 mAb was used as a positive control to demonstrate IL-13 binding in this assay.

### Example 3

### Binding of mAb-dAbs to Recombinant E. Coli-Expressed Human IL-13 and Recombinant E. Coli-Expressed Human IL-4 by Surface Plasmon Resonance (BIAcore™)

### 3.1 Binding of Anti-IL13mAb-Anti-IL4dAbs to IL-13 and IL-4 by BIAcore™

[0373] mAb-dAb containing CHO cell supernatants prepared as described in section 1.5, were tested for binding to recombinant E. Coli-expressed human IL-13 using BIAcore™ at 25° C. (as described in method 4). For this data set, two IL-13 concentrations curves (100 nM and 1 nM) were assessed and relative response capture levels of between 1000 and 1300 (approximately) were achieved for each mAb-dAb construct. Due to the limited number of concentrations of IL-13 used, the data generated are more suitable for ranking of constructs rather than exact kinetic measurements. These data are illustrated in Table 6.

TABLE 6

| Antibody | Binding affinity KD (nM) |
|---|---|
| 586H-25 | 0.39 |
| 586H-G4S-25 | 0.41 |
| 586H-TVAAPS-25 | 0.5 |
| 586H-ASTKG-25 | 0.54 |
| 586H-EPKSC-25 | 0.55 |
| 586H-ELQLE-25 | 0.42 |
| 586H-147 | 0.46 |
| 586H-G4S-147 | 0.45 |
| 586H-TVAAPS-147 | 0.56 |
| 586H-ASTKG-147 | 0.44 |
| 586H-EPKSC-147 | 0.46 |
| 586H-ELQLE-147 | 0.51 |
| 586H-154 | 0.46 |
| 586H-G4S-154 | 0.37 |
| 586H-TVAAPS-154 | 0.56 |
| 586H-ASTKG-154 | 0.44 |
| 586H-EPKSC-154 | 0.42 |
| 586H-ELQLE-154 | 0.44 |
| 586H-210 | 0.44 |
| 586H-G4S-210 | 0.42 |
| 586H-TVAAPS-210 | 0.4 |
| 586H-ASTKG-210 | 0.4 |
| 586H-EPKSC-210 | 0.43 |
| 586H-ELQLE-210 | 0.43 |
| 586H | 0.44 |
| 586H-ASTKG | 0.32 |
| 586H-ELQLE | 0.47 |
| 586H-EPKSC | 0.45 |
| Anti-human IL-13 mAb (purified) | 0.38 |
| Pascolizumab (purified) | no binding |

[0374] All of these anti-IL13mAb-anti-IL4dAbs bound IL-13 with similar binding affinities which were approximately equivalent to the binding affinity of purified anti-human IL13 mAb alone. These data suggested that the addition of linkers and/or anti-IL4 dAbs to the heavy chain of the anti-IL13 mAb, did not affect the IL-13 binding affinity of the mAb component within these mAb-dAb constructs.

[0375] These same mAb-dAb containing CHO cell supernatants prepared as described in section 1.5, were also tested for binding to recombinant E. Coli-expressed human IL-4 using BIAcore™ at 25° C. (as described in method 5). These data are illustrated in Table 7. For this data set, four IL-4 concentration curves (256, 64, 16 and 4 nM) were assessed and approximate relative response capture levels for each mAb-dAb tested are indicated in the table. Note that the anti-IL-4 dAbs alone (DOM9-155-25, DOM9-155-154 and DOM9-112-210) were not tested in this assay as the dAbs cannot be captured onto the Protein A or anti-human IgG coated CM5 chip; instead, the anti-human IL4 mAb (Pascolizumab) was used as a positive control to demonstrate IL-4 binding in this assay.

TABLE 7

| | | | | Binding |
|---|---|---|---|---|
| | Capture | On rate | Off rate | affinity KD |
| Antibody | Level | (ka) | (kd) | (nM) |
| 586H-25 | 864 | 6.13e3 | 4.11e−4 | 67 |
| 586H-G4S-25 | 1818 | 6.3e3 | 9.54e−4 | 151 |
| 586H-TVAAPS-25 | 673 | 1.27e5 | 1.2e−4 | 0.95 |
| 586H-ASTKG-25 | 809 | 5.4e5 | 1.20e3 | 21.8 |
| 586H-EPKSC-25 | 748 | 4.79e4 | 1.42e−3 | 29.6 |
| 586H-ELQLE-25 | 603 | 1.26e6 | 1.63e−6 | 0.001* |
| 586H-147 | 1095 | 3.42e3 | 1.18e−3 | 344.8 |
| 586H-G4S-147 | 1200 | 4.21e3 | 4.57e−4 | 108.5 |
| 586H-TVAAPS-147 | 433 | 6.62e4 | 6.69e−7 | 0.011** |
| 586H-ASTKG-147 | 1248 | 3.67e4 | 6.9e−4 | 18.8 |
| 586H-EPKSC-147 | 878 | 2.54e4 | 6.71e−4 | 26.4 |
| 586H-ELQLE-147 | 676 | 7.01e5 | 1.52e−5 | 0.027* |
| 586H-154 | 436 | 6.1e3 | 1.74e−3 | 285 |
| 586H-G4S-154 | 1437 | 5.00e3 | 6.85e−4 | 137.8 |
| 586H-TVAAPS-154 | 1530 | 6.44e4 | 1.15e−7 | 0.002** |
| 586H-ASTKG-154 | 1373 | 3.26e4 | 2.84e−4 | 8.7 |
| 586H-EPKSC-154 | 794 | 3.03e4 | 5.7e−4 | 18.8 |
| 586H-ELQLE-154 | 795 | 1.25e6 | 3.57e−6 | 0.003* |
| 586H-210 | 1520 | not | not | — |
| | | determined | determined | |
| 586H-G4S-210 | 1448 | not | not | — |
| | | determined | determined | |
| 586H-TVAAPS-210 | 1693 | not | not | — |
| | | determined | determined | |
| 586H-ASTKG-210 | 1768 | not | not | — |
| | | determined | determined | |
| 586H-EPKSC-210 | 1729 | not | not | — |
| | | determined | determined | |
| 586H-ELQLE-210 | 1350 | not | not | — |
| | | determined | determined | |
| 586H | 1500 | no binding | no binding | — |
| 586H-ASTKG | 1615 | no binding | no binding | — |
| 586H-ELQLE | 343 | no binding | no binding | — |
| 586H-EPKSC | 1416 | no binding | no binding | — |
| Pascolizumab | 1092 | 2.04e6 | 1.23e−4 | 0.060 |
| (purified) | | | | |

Caveats were observed for some of the above data sets. Poor curve fits were observed for some data sets (*), the actual binding affinity values that have been determined for these data should therefore be treated with caution. Positive dissociation was seen for some curves (**), the actual binding affinity values that have been determined for these data should therefore be treated with caution. In addition, BIAcore ™ was unable (ie. not sensitive enough) to determine on and off rates for all mAb-dAb constructs containing the DOM9-112-210 dAb, due to the exceptionally tight binding of these mAb-dAbs to IL-4. Determination of binding kinetics for these mAb-dAbs for IL-4 was further hampered by observed positive dissociation effects.

[0376] These data are also illustrated in FIG. 21.

[0377] Similar data was obtained in an additional experiment. These data are also illustrated in FIG. 22.

[0378] These 2 independent data sets indicated that all of the anti-IL13mAb-anti-IL4dAbs bound IL-4, but the binding affinities varied depending on the linker used to join the anti-IL4 dAb to the anti-IL13 mAb heavy chain. In general, the presence of a linker was found to enhance the binding affinity for IL-4 of the anti-IL4 dAb component (when placed on the heavy chain) in the mAb-dAb format. In particular, the TVAAPS and ELQLEESCAEAQDGELDG linkers were best. No binding to IL-4 was observed when no anti-IL4 dAb was present in the mAb-dAb construct. It was not possible to measure the binding affinity of the 586-linker-210 mAb-dAbs for IL-4, due to the fact that the DOM9-112-210 component of these mAb-dAbs binds very tightly and hence the off-rate is too small to determine using BIAcore™.

[0379] The purified anti-IL13mAb-anti-IL4dAbs, 586H-TVAAPS-25, 586H-TVAAPS-154 and 586H-TVAAPS-210, were also tested for binding to recombinant E. Coli-expressed human IL-13 and recombinant E. Coli-expressed human IL-4 using BIAcore™ at 25° C. (as described in methods 4 and 5). These data are illustrated in Table 8.

TABLE 8

| | Binding affinity, KD (nM) | |
|---|---|---|
| Construct | Human IL-13 | Human IL-4 |
| 586H-TVAAPS-25 | 0.38 | 1.1 |
| 586H-TVAAPS-154 | 0.41 | 0.49 |
| 586H-TVAAPS-210 | 0.38 | very tight binder |
| | | (unable to determine KD due to |
| | | positive dissociation effects and |
| | | sensitivity level of BIAcore ™ |
| | | technique) |
| Anti-human IL-13 | 0.43 | — |
| mAb (purified) | | |
| Pascolizumab | — | 0.03 |
| (purified) | | |

586H-TVAAPS-25, 586H-TVAAPS-154 and 586H-TVAAPS-210 all bound IL-13 with similar binding affinities and this was approximately equivalent to the binding affinity of purified anti-human IL13 mAb alone. 586H-TVAAPS-25, 586H-TVAAPS-154 and 586H-TVAAPS-210 all bound IL-4. It was not possible to measure the binding affinity of 586-TVAAPS-210 for IL-4, due to the fact that the DOM9-112-210 component of this mAb-dAb bound very tightly and hence the off-rate was too small to determine using BIAcore™. Note that the anti-IL-4 dAbs alone (DOM9-155-25, DOM9-155-154 and DOM9-112-210) were not tested in this assay format as the dAbs cannot be captured onto the Protein A or anti-human IgG coated CM5 chip; instead, the anti-human IL4 mAb (Pascolizumab) was used as a positive control to demonstrate IL-4 binding in this assay.

### 3.2 Binding of Anti-IL4mAb-Anti-IL13dAbs to IL-4 and IL-13 by BIAcore™

[0380] mAb-dAb containing CHO cell supernatants prepared as described in section 1.5, were tested for binding to recombinant E. Coli-expressed human IL-4 using BIAcore™ at 25° C. (as described in method 5). These data are illustrated in Table 9 (some samples were prepared and tested in duplicate, this has been annotated as sample 1 and sample 2). For this data set, four IL-4 concentrations curves (100 nM, 10 nM, 1 nM and 0.1 nM) were assessed and approximate relative response capture levels for each mAb-dAb tested are indicated in the table. An isotype-matched mAb (with specificity for an irrelevant antigen) was also included as a negative control for binding to IL-4 in this assay.

TABLE 9

| | | | | |
|---|---|---|---|---|
| | | | | Binding |
| | Capture | On rate | Off rate | affinity KD |
| Antibody | Level | (ka) | (kd) | (nM) |

Experiment 1

| | | | | |
|---|---|---|---|---|
| PascoH-G4S-474 | ~500 | 5.1e6 | 8.6e−5 | 0.02 |
| PascoH-TVAAPS-474 | ~500 | 5.5e6 | 9.7e−5 | 0.02 |
| PascoH-474 | ~500 | 4.8e6 | 9.4e−5 | 0.02 |
| PascoH-ASTKG-474 | ~500 | 5.3e6 | 8.6e−5 | 0.02 |
| PascoH-ELQLE-474 | ~500 | 5.1e6 | 1.1e−4 | 0.02 |
| PascoH-EPKSC-474 | ~500 | 4.9e6 | 9.8e−5 | 0.02 |
| Pascolizumab | ~700 | 5.3e6 | 1.6e−4 | 0.03 |
| (purified) | | | | |

Experiment 2

| | | | | |
|---|---|---|---|---|
| PascoL-G4S-474 | 1871 | 2.14e6 | 1.35e−4 | 0.063 |
| (sample 1) | | | | |
| PascoL-G4S-474 | 1921 | 2.13e6 | 1.11e−4 | 0.052 |
| (sample 2) | | | | |
| PascoL-TVAAPS-474 | 2796 | 2.48e6 | 2.12e−4 | 0.085 |
| (sample 1) | | | | |
| PascoL-TVAAPS-474 | 3250 | 3.04e6 | 2.79e−4 | 0.092 |
| (sample 2) | | | | |
| PascoL-474 | 3254 | 2.8e6 | 1.84e−4 | 0.065 |
| (sample 1) | | | | |
| PascoL-474 | 2756 | 2.53e6 | 1.22e−4 | 0.048 |
| (sample 2) | | | | |
| PascoL-ASTKG-474 | 3037 | 2.95e6 | 1.21e−4 | 0.041 |
| (sample 1) | | | | |
| PascoL-ASTKG-474 | 3784 | 2.54e6 | 1.52e−4 | 0.060 |
| (sample 2) | | | | |
| PascoL-EPKSC-474 | 3238 | 1.86e6 | 2.58e−4 | 0.139 |
| (sample 1) | | | | |
| PascoL-EPKSC-474 | 3276 | 2.51e6 | 3.18e−4 | 0.127 |
| (sample 2) | | | | |
| Pascolizumab | 1152 | 2.04e6 | 1.23e−4 | 0.060 |
| (purified) | | | | |
| Negative control | 2976 | no | no | — |
| mAb | | binding | binding | |

[0381] All of the anti-IL4mAb-anti-IL13dAbs bound IL-4 with similar binding affinities and this was approximately equivalent to the binding affinity of the anti-human IL4 mAb alone (Pascolizumab). PascoL-EPKSC-474 bound IL-4 approximately 2-fold less potently than Pascolizumab. These data suggested that the addition of linkers and the anti-IL13 dAb to either the heavy chain or the light chain of Pascolizumab, did not overtly affect the IL-4 binding affinity of the mAb component within the mAb-dAb construct.

[0382] These same mAb-dAb containing CHO cell supernatants prepared as described in section 1.5, were also tested for binding to recombinant E. Coli-expressed human IL-13 using BIAcore™ at 25° C. (as described in method 4). These data are illustrated in Table 10 (some samples were prepared and tested in duplicate, this has been annotated as sample 1 and sample 2). For this data set, four IL-13 concentrations curves (128 nM, 32 nM, 8 nM and 2 nM) were assessed and approximate relative response capture levels for each mAb-dAb tested are indicated in the table.

TABLE 10

| | | | | |
|---|---|---|---|---|
| | | | | Binding |
| | Capture | On rate | Off rate | affinity KD |
| Antibody | Level | (ka) | (kd) | (nM) |

Experiment 1

| | | | | |
|---|---|---|---|---|
| PascoH-474 | ~500 | 3.6e5 | 3.1e−4 | 0.84 |
| PascoH-G4S-474 | ~500 | 3.9e5 | 2.6e−4 | 0.67 |
| PascoH-TVAAPS-474 | ~500 | 4.5e5 | 4.2e−4 | 0.94 |
| PascoH-ASTKG-474 | ~500 | 3.1e5 | 4.6e−4 | 1.5 |
| PascoH-ELQLE-474 | ~500 | 3.4e5 | 6.2e−4 | 1.8 |
| PascoH-EPKSC-474 | ~500 | 3.5e5 | 4.0e−4 | 1.1 |
| Anti-human IL-13 mAb | ~650 | 8.6e−5 | 4.9e−4 | 0.57 |
| (purified) | | | | |

Experiment 2

| | | | | |
|---|---|---|---|---|
| PascoL-474 | 3254 | 2.86e5 | 3.82e−4 | 1.34 |
| (sample 1) | | | | |
| PascoL-474 | 2756 | 3.12e5 | 3.86e−4 | 1.24 |
| (sample 2) | | | | |
| PascoL-G4S-474 | 1871 | 5.63e5 | 4.25e−4 | 0.756 |
| (sample 1) | | | | |
| PascoL-G4S-474 | 1921 | 5.59e5 | 3.47e−4 | 0.621 |
| (sample 2) | | | | |
| PascoL-TVAAPS-474 | 2796 | 7.42e5 | 2.58e−4 | 0.348 |
| (sample 1) | | | | |
| PascoL-TVAAPS-474 | 3250 | 6.22e5 | 1.71e−4 | 0.275 |
| (sample 2) | | | | |
| PascoL-ASTKG-474 | 3037 | 5.26e5 | 2.38e−4 | 0.451 |
| (sample 1) | | | | |
| PascoL-ASTKG-474 | 3784 | 5.38e5 | 3.20e−4 | 0.595 |
| (sample 2) | | | | |
| PascoL-EPKSC-474 | 3238 | 4.17e5 | 3.34e−4 | 0.801 |
| (sample 1) | | | | |
| PascoL-EPKSC-474 | 3276 | 3.51e5 | 2.86e−4 | 0.815 |
| (sample 2) | | | | |
| Anti-human IL-13 mAb | 1373 | 9.12e−4 | 6.11e−4 | 0.67 |
| (purified) | | | | |
| Pascolizumab | 1152 | no | no | — |
| (purified) | | binding | binding | |
| Negative control | 2976 | no | no | — |
| mAb | | binding | binding | |

[0383] Binding affinity data for constructs tested in experiment 2 are also illustrated in FIG. 23.

[0384] All of the anti-IL4mAb-anti-IL13dAbs bound IL-13. The presence of a linker did not appear to enhance the binding affinity for IL-13 of the anti-IL13 dAb component when placed on the heavy chain of the anti-IL4 mAb. However, the presence of a linker did appear to enhance the binding affinity for IL-13 of the anti-IL13 dAb component when placed on the light chain of the anti-IL4 mAb. PascoL-TVAAPS-474 had the most potent IL-13 binding affinity.

[0385] Note that the anti-IL-13 dAb alone (DOM10-53-474) was not tested in this assay as the dAb cannot be captured onto the Protein A or anti-human IgG coated CM5 chip; instead, purified anti-human IL13 mAb was used as a positive control to demonstrate IL-13 binding in this assay. An isotype-matched mAb (with specificity for an irrelevant antigen) was also included as a negative control for binding to IL-13 in this assay.

[0386] The purified anti-IL4mAb-anti-IL13dAbs, PascoH-G4S-474, PascoH-474, PascoL-G4S-474 and PascoHL-G4S-474, were also tested for binding to recombinant E. Coli-expressed human IL-4 and recombinant E. Coli-expressed human IL-13 using BIAcore™ at 25° C. (as described in methods 4 and 5). These data are illustrated in Table 11.

TABLE 11

| | Binding affinity, KD (nM) | |
|---|---|---|
| Construct | Human IL-4 | Human IL-13 |
| PascoH-G4S-474 | 0.036 | 0.58 |
| PascoH-474 | 0.037 | 0.71 |
| PascoL-G4S-474 | 0.028 | 1.2 |
| PascoHL-G4S-474 | 0.035 | 0.87 |
| Anti-human IL-13 mAb (purified) | — | 0.41 |
| Pascolizumab (purified) | 0.037 | — |

[0387] PascoH-G4S-474, PascoH-474, PascoL-G4S-474 and PascoHL-G4S-474 all bound IL-4 with similar binding affinities and this was approximately equivalent to the binding affinity of the anti-human IL4 mAb alone (Pascolizumab). PascoH-G4S-474, PascoH-474, PascoL-G4S-474 and PascoHL-G4S-474 all bound IL-13. Note that the anti-IL-13 dAb alone (DOM10-53-474) was not tested in this assay as the dAb cannot be captured onto the Protein A or anti-human IgG coated CM5 chip; instead, the anti-human IL13 mAb was used as a positive control to demonstrate IL-13 binding in this assay.

### 3.3 Stoichiometry of Binding of IL-13 and IL-4 to the Anti-IL4mAb-Anti-IL13dAbs Using BIAcore™

[0388] The purified anti-IL4mAb-anti-IL13dAbs, PascoH-G4S-474, PascoH-474, PascoL-G4S-474 and PascoHL-G4S-474, were evaluated for stoichiometry of binding for IL-13 and IL-4 using BIAcore™ (as described in method 7). These data are illustrated in Table 12.

TABLE 12

| | Stoichiometry | |
|---|---|---|
| Construct | Human IL-4 | Human IL-13 |
| PascoL-G4S-474 | 1.8 | 1.8 |
| PascoH-G4S-474 | 1.8 | 1.9 |
| Pasco-474 | 1.8 | 1.9 |
| PascoHL-G4S-474 | 1.7 | 3.5 |
| Anti-human IL-13 mAb (purified) | — | 1.8 |
| Pascolizumab (purified) | 1.8 | — |

[0389] PascoH-G4S-474, PascoH-474 and PascoL-G4S-474 were able to binding nearly two constructs of IL-13 and two constructs of IL-4. PascoHL-G4S-474 was able to bind nearly two constructs of IL-4 and nearly four constructs of IL-13. These data indicated that the constructs tested could be fully occupied by the expected number of IL-13 or IL-4 molecules.

### 3.4 Neutralisation Potency of Anti-IL13mAb-Anti-IL4dAbs in IL-13 and IL-4 Bioassays

[0390] The purified anti-IL13mAb-anti-IL4dAbs, 586H-TVAAPS-25, 586H-TVAAPS-154 and 586H-TVAAPS-210, were tested for neutralisation of recombinant E. Coli-expressed human IL-13 in a TF-1 cell bioassay (as described in method 8). These data are illustrated in FIG. 24.

[0391] Purified anti-IL13mAb-anti-IL4dAbs, 586H-TVAAPS-25, 586H-TVAAPS-154 and 586H-TVAAPS-210, fully neutralised the bioactivity of IL-13 in a TF-1 cell bioassay. The neutralisation potencies of these mAb-dAbs were within 2-fold of purified anti-human IL-13 mAb alone. The purified anti-human IL-4 mAb (Pascolizumab) and purified anti-IL4 dAbs (DOM9-155-25, DOM9-155-154 or DOM9-112-210) were included as negative controls for neutralisation of IL-13 in this assay.

[0392] The purified anti-IL13mAb-anti-IL4dAbs, 586H-TVAAPS-25, 586H-TVAAPS-154 and 586H-TVAAPS-210, were also tested for neutralisation of recombinant E. Coli-expressed human IL-4 in a TF-1 cell bioassay (as described in method 9). These data are illustrated in FIG. 25.

[0393] Purified anti-IL13mAb-anti-IL4dAb, 586H-TVAAPS-210, fully neutralised the bioactivity of IL-4 in this TF-1 cell bioassay. The neutralisation potency of this mAb-dAb was within 2-fold of purified anti-human IL-4 dAb alone (DOM9-112-210). The purified anti-IL13mAb-anti-IL4dAbs, 586H-TVAAPS-25 and 586H-TVAAPS-154, did not neutralise the bioactivity of IL-4 and this was in contrast to the purified anti-human IL-4 dAbs alone (DOM9-155-25 and DOM9-155-154). As demonstrated by BIAcore™, purified 586H-TVAAPS-25 and 586H-TVAAPS-154 had 1.1 nM and 0.49 nM binding affinities (respectively) for IL-4. IL-4 binds the IL-4 receptor very tightly (binding affinities of approximately 50 pM have been reported in literature publications) and thus the observation that both 586H-TVAAPS-25 or 586H-TVAAPS-154 were unable to effectively neutralise the bioactivity of IL-4 in the TF-1 cell bioassay maybe a result of the relative lower affinity of these mAb-dAbs for IL-4 compared to the potency of IL-4 for the IL-4 receptor.

[0394] Purified anti-human IL-4 mAb (Pascolizumab) was included as a positive control for neutralisation of IL-4 in this bioassay. Purified anti-human IL-13 mAb was included as a negative control for neutralisation of IL-4 in this bioassay.

### 3.5 Neutralisation Potency of Anti-IL4mAb-Anti-IL13dAbs in IL-13 and IL-4 Bioassays

[0395] The purified anti-IL4mAb-anti-IL13dAbs, PascoH-G4S-474, PascoH-474, PascoL-G4S-474 and PascoHL-G4S-474, were tested for neutralisation of recombinant E. Coli-expressed human IL-4 in a TF-1 cell bioassay (as described in method 9). These data are illustrated in FIG. 26.

[0396] Purified anti-IL4mAb-anti-IL13dAbs, PascoH-G4S-474, PascoH-474, PascoL-G4S-474 and PascoHL-G4S-474, fully neutralised the bioactivity of IL-4 in a TF-1 cell bioassay. The neutralisation potencies of these mAb-dAbs were approximately equivalent to that of purified anti-human IL4 mAb alone (Pascolizumab), Purified anti-human IL-13 mAb, purified DOM10-53-474 dAb and a dAb with specificity for an irrelevant antigen (negative control dAb) were also included as negative controls for neutralisation of IL-4 in this bioassay.

[0397] The purified anti-IL4mAb-anti-IL13dAbs, PascoH-G4S-474, PascoH-474, PascoL-G4S-474 and PascoHL-G4S-474, were tested for neutralisation of recombinant E. Coli-expressed human IL-13 in a TF-1 cell bioassay (as described in method 8). These data are illustrated in FIG. 27.

[0398] Purified anti-IL4mAb-anti-IL13dAbs, PascoH-G4S-474, PascoH-474, PascoL-G4S-474 and PascoHL-G4S-474, fully neutralised the bioactivity of IL-13 in a TF-1 cell bioassay. The neutralisation potencies of these mAb-dAbs were within 3-fold of purified anti-IL13 dAb alone (DOM10-53-474). Purified anti-human IL-13 mAb was also included as a positive control for IL-13 neutralisation in this bioassay. A dAb with specificity for an irrelevant antigen (negative control dAb) and purified anti-human IL4 mAb alone (Pascolizumab) were also included as negative controls for neutralisation of IL-4 in this bioassay.

[0399] The purified anti-IL4mAb-anti-IL13dAbs, PascoH-G4S-474, PascoH-474, PascoL-G4S-474 and PascoHL-G4S-474, were also tested for simultaneous neutralisation of recombinant E. Coli-expressed human IL-4 and recombinant E. Coli-expressed human IL-13 in a dual neutralisation TF-1 cell bioassay (as described in method 11). These data are illustrated in FIG. 28.

[0400] Purified anti-IL4mAb-anti-IL13dAbs, PascoH-G4S-474, PascoH-474, PascoL-G4S-474 and PascoHL-G4S-474, fully neutralised the bioactivity of both IL-4 and IL-13 in a dual neutralisation TF-1 cell bioassay. The neutralisation potencies of these mAb-dAbs were approximately equivalent to that of a combination of purified anti-human IL4 mAb (Pascolizumab) and purified anti-IL13 dAb (DOM10-53-474). Purified anti-human IL-13 mAb alone, purified anti-human IL-4 mAb alone (Pascolizumab) and the anti-human IL-13 dAb (DOM10-53-474) alone (which were included as negative controls) did not fully neutralise the bioactivity of both IL-4 and IL-13 in this dual IL-4 and IL-13 neutralisation bioassay.

### Example 5

### SEC-MALLS Analysis of dAbs

[0401] Antigen-specific dAbs were characterized for their solution state by SEC-MALLS (size-exclusion chromatography—multi-angle laser light scattering) and the results are shown in Table 13: the DOM10-53-474, dAb exists as a monomer in solution whilst all DOM9 dAbs (DOM9-112-210, DOM9-155-25, DOM9-155-147 and DOM9-155-154) form stable dimers at low concentration (and in some instances tetramers at high concentration).

### 5.1. Preparation of the Proteins

[0402] Samples were purified and dialysed into appropriate buffer (PBS). Samples were filtered after dialysis, concentration determined and adjusted to 1 mg/ml. BSA was purchased from Sigma and used without further purification.

### 5.2. Size-Exclusion Chromatography and Detector Set-Up

[0403] Shimadzu LC-20AD Prominence HPLC system with an autosampler (SIL-20A) and SPD-20A Prominence UV/Vis detector was connected to Wyatt Mini Dawn Treos (MALLS, multi-angle laser light scattering detector) and Wyatt Optilab rEX DRI (differential refractive index) detector. The detectors were connected in the following order—LS-UV-RI. Both RI and LS instruments operated at a wavelength of 488 nm. TSK2000 (Tosoh corporation) or BioSep2000 (Phenomenex) columns were used (both are silica-based HPLC columns with similar separation range, 1-300 kDa) with mobile phase of 50 or 200 mM phosphate buffer (with or without salt), pH7.4 or 1×PBS. The flow rate used is 0.5 or 1 ml/min, the time of the run was adjusted to reflect different flow rates (45 or 23 min) and is not expected to have significant impact onto separation of the molecules. Proteins were prepared in PBS to a concentration of 1 mg/ml and injection volume was 100 ul.

### 5.3. Detector Calibration

[0404] The light-scattering detector was calibrated with toluene according to manufacturer's instructions.

5.4. Detector Calibration with BSA

[0405] The UV detector output and RI detector output were connected to the light scattering instrument so that the signals from all three detectors could be simultaneously collected with the Wyatt ASTRA software. Several injections of BSA in a mobile phase of PBS (0.5 or 1 ml/min) are run over a Tosoh TSK2000 column with UV, LS and RI signals collected by the Wyatt software. The traces are then analysed using ASTRA software, and the signals are normalised aligned and corrected for band broadening following manufacturer's instructions. Calibration constants are then averaged and input into the template which is used for future sample runs.

### 5.5. Absolute Molar Mass Calculations

[0406] 100 ul of 1 mg/ml sample were injected onto appropriate pre-equilibrated column. After SEC column the sample passes through 3 on-line detectors—UV, MALLS (multi-angle laser light scattering) and DRI (differential refractive index) allowing absolute molar mass determination. The dilution that takes place on the column is about 10 fold, so the concentration at which in-solution state is determined is 100 ug/ml, or about 8 uM dAb.

[0407] The basis of the calculations in ASTRA as well as of the Zimm plot technique, which is often implemented in a batch sample mode is the equation from Zimm[J. Chem. Phys. 16, 1093-1099 (1948)]:

$$\frac{{R}_{q}}{{K}^{*} c} = MP ( θ ) - 2 {A}_{2} {cM}^{2} {P}^{2} ( θ ) \qquad ( Eq . 1 )$$

[0408] where
[0409] c is the mass concentration of the solute molecules in the solvent (g/mL)
[0410] M is the weight average molar mass (g/mol)
[0411] A₂ is the second virial coefficient (mol mL/g²)
[0412] K*=4p² n₀² (dn/dc)² l₀⁻⁴ N_{A}⁻¹ is an optical constant where n₀ is the refractive index of the solvent at the incident radiation (vacuum) wavelength, l₀ is the incident radiation (vacuum) wavelength, expressed in nanometers, N_{A} is Avogadro's number, equal to 6.022×10²³ mol⁻¹, and do/dc is the differential refractive index increment of the solvent-solute solution with respect to a change in solute concentration, expressed in mL/g (this factor must be measured independently using a dRI detector).
[0413] P(q) is the theoretically-derived form factor, approximately equal to 1−2μ² [symbol] r² [symbol] /3|+ . . . , where μ=(4π/λ)sin(θ/2), and <r²> is the mean square radius. P(q) is a function of the molecules' z-average size, shape, and structure.
[0414] R_{q} is the excess Rayleigh ratio (cm⁻¹)

[0415] This equation assumes vertically polarized incident light and is valid to order c².

[0416] To perform calculations with the Zimm fit method, which is a fit to R_{q}/K*c vs. sin²(q/2), we need to expand the reciprocal of Eq. 1 first order in c:

[0417] To perform calculations with the Zimm fit method, which is a fit to

[0418] Rq/K*c vs. sin²(q/2), we need to expand the reciprocal of Eq. 1 to first order in c:

$$\frac{{K}^{*} c}{{R}_{q}} = \frac{1}{MP ( θ )} + 2 {A}_{2} c \qquad Eq . 2$$

[0419] The appropriate results in this case are

$$\begin{matrix}M = {( \frac{{K}^{*} c}{{R}_{q}} - 2 {A}_{2} c )}^{- 1} and & Eq . 3 \\ 〈 {r}^{2} 〉 = \frac{3 {m}_{0} {λ}^{2} M}{16 {π}^{2}} where & Eq . 4 \\ {m}_{0} ≡ d [ {K}^{*} c \text{/} {R}_{q} ] \text{/} {d [ {sin}^{2} ( θ \text{/} 2 ) ]}_{θ - 0} & Eq . 5\end{matrix}$$

[0420] The calculations are performed automatically by ASTRA software, resulting in a plot with molar mass determined for each of the slices [Astra manual].

[0421] Molar mass obtained from the plot for each of the peaks observed on chromatogram is compared with expected molecular mass of a single unit of the protein. This allows to draw conclusions about in-solution state of the protein.

TABLE 13
Summary

| | SEC- | | |
|---|---|---|---|
| dAb | MALLS | Mw | Column & mobile phase |
| DOM10- | monomer | 14 kDa | TSK2000, PBS pH 7.4, |
| 53-474 | | | 0.5 ml/min |
| DOM9- | dimer | 30 kDa | TSK2000, PBS pH 7.4, |
| 112-210 | | | 0.5 ml/min |
| DOM9- | dimer | 28 kDa | TSK2000, 50 mM phosphate |
| 155-25 | | | buffer, pH 7.4, 1 ml/min |
| DOM9- | dimer- | 26-51 kDa | TSK2000, 50 mM phosphate |
| 155-147 | tetramer | | buffer, pH 7.4, 1 ml/min |
| | equilibrium | | |
| DOM9- | dimer | 28 kDa | TSK2000, 50 mM phosphate |
| 155-154 | | | buffer, pH 7.4, 1 ml/min |

### DOM 10-53-474

[0422] Single peak with the molar mass defined as 13 kDa indicating a monomeric state in solution, shown in FIG. 29

### DOM 9-112-210

[0423] Single peak with the molar mass defined as 30 kDa indicating a dimeric state in solution, shown in FIG. 30

### DOM9-155-25

[0424] Nice symmetrical peak but running at the buffer front. The mid part of the peak has been used for molar mass determination (see figure below with all three signals overlaid). Molar mass is 28 kDa which represents a dimeric dAb, shown in FIG. 31.

### Overlay of all Three Signals (FIG. 32)

### DOM9-155-147

[0425] The main peak is assigned with molar mass of 26 kDa over the right part of the peak and increasing steeply over the left part of the peak up to 53 kDa. The peak most likely represents a dimer and a smaller fraction of tetramer in a rapid equilibrium. A much smaller peak eluting at 7.6 min, represents tetrameric protein with molar mass of 51 kDa (FIG. 33).

### DOM9-155-154

[0426] The protein runs as a single symmetric peak, with molar mass assigned at 28 kDa indicating a dimeric state in solution (FIG. 34)

### Control for MW Assignment by SEC-MALLS: BSA

[0427] BSA has run as expected, 2 peaks with molar mass of 67 and 145 kDa (monomer and dimer) (FIG. 35).

### Example 6

### Generation of Trispecific mAb-dAbs

[0428] Trispecific mAb-dAbs were constructed by grafting one domain antibody onto the C-terminal end of the heavy chain of a monoclonal antibody and another different domain antibody onto the C-terminal end of the light chain of the monoclonal antibody. A linker sequence was used to join the domain antibody to heavy chain CH3 or light chain CK. A schematic diagram of a trispecific mAb-dAb molecule is shown in FIG. 36 (the mAb heavy chain is drawn in grey; the mAb light chain is drawn in white; the dAbs are drawn in black).

[0429] A schematic diagram illustrating the construction of a trispecific mAb-dAb heavy chain (top illustration) or a trispecific mAb-dAb light chain (bottom illustration) is shown FIG. 178.

[0430] [For the heavy chain: ‘V_{H}’ is the monoclonal antibody variable heavy chain sequence; ‘CH1, CH2 and CH3’ are human IgG1 heavy chain constant region sequences; ‘linker’ is the sequence of the specific linker region used; ‘dAb’ is the domain antibody sequence. For the light chain: ‘V_{L}’ is the monoclonal antibody variable light chain sequence; ‘CK’ is the human light chain constant region sequence; ‘linker’ is the sequence of the specific linker region used; ‘dAb’ is the domain antibody sequence].

[0431] A human amino acid signal sequence (as shown in sequence ID number 64) was used in the construction of these constructs.

[0432] For expression of a trispecific mAb-dAb where one dAb was grafted onto the C-terminal end of the heavy chain of the monoclonal antibody and where the other different dAb was grafted onto the C-terminal end of the light chain of the monoclonal antibody, the appropriate heavy chain mAb-dAb expression vector was paired with the appropriate light chain mAb-dAb expression vector.

6.1 Trispecific anti-IL18mAb-anti-IL4dAb-anti-IL13dAb A trispecific anti-IL18mAb-anti-IL4dAb-anti-IL13dAb (also known as IL18mAb-210-474) was constructed by grafting an anti-human IL-4 domain antibody (DOM9-112-210) onto the heavy chain and an anti-IL13 domain antibody (DOM10-53-474) onto the light chain of an anti-human IL-18 humanised monoclonal antibody. A G4S linker was used to join the anti-IL4 domain antibody onto the heavy chain of the monoclonal antibody. A G4S linker was also used to join the anti-IL13 domain antibody onto the light chain of the monoclonal antibody.

[0433] IL18 mAb-210-474 was expressed transiently in CHOK1 cell supernatants, and following quantification of IL18mAb-210-474 in the cell supernatant, analysed in a number of IL-18, IL-4 and IL-13 binding assays.

| Name | Description | Sequence ID No. |
|---|---|---|
| IL18mAb- | H chain = Anti-human IL-18 mAb heavy | 69 (=H chain) |
| 210-474 | chain-G4S linker-DOM9-112-210 dAb | 70 (=L chain) |
| | L chain = Anti-human IL-18 mAb light | |
| | chain-G4S linker-DOM10-53-474 dAb | |

### 6.2 Trispecific Anti-IL5mAb-Anti-IL4dAb-Anti-IL13dAb

[0434] A trispecific anti-IL5mAb-anti-IL4dAb-anti-IL13dAb (also known as Mepo-210-474) was constructed by grafting an anti-human IL-4 domain antibody (DOM9-112-210) onto the heavy chain and an anti-IL13 domain antibody (DOM10-53-474) onto the light chain of an anti-human IL-5 humanised monoclonal antibody (Mepolizumab). A G4S linker was used to join the anti-IL4 domain antibody onto the heavy chain of the monoclonal antibody. A G4S linker was also used to join the anti-IL13 domain antibody onto the light chain of the monoclonal antibody.

[0435] Mepo-210-474 was expressed transiently in CHOK1 cell supernatants, and following quantification of Mepo-210-474 in the cell supernatant, analysed in a number of IL-4, IL-5 and IL-13 binding assays.

| Name | Description | Sequence ID No. |
|---|---|---|
| Mepo-210- | H chain = Anti-human IL-5 mAb heavy | 71 (=H chain) |
| 474 | chain-G4S linker-DOM9-112-210 dAb | 72 (=L chain) |
| | L chain = Anti-human IL-5 mAb light | |
| | chain-G4S linker-DOM10-53-474 dAb | |

### 6.3 Sequence ID Numbers for Monoclonal Antibodies, Domain Antibodies and Linkers

[0436] Sequence IDs numbers for the monoclonal antibodies, domain antibodies and linkers used to generate the trispecific mAb-dAbs (or used as control reagents in the following exemplifications) are shown below in table 14.

TABLE 14

| Name | Specificity | Sequence ID |
|---|---|---|
| DOM9-112-210 domain antibody | Human IL-4 | 4 |
| DOM10-53-474 domain antibody | Human IL-13 | 5 |
| GGGGS linker sequence (this is a | | 6 |
| published linker sequence) | | |
| Pascolizumab (Anti-human IL-4 | Human IL-4 | 14 (=H chain) |
| monoclonal antibody) | | 15 (=L chain) |
| Mepolizumab (Anti-human IL-5 | Human IL-5 | 65 (=H chain) |
| monoclonal antibody) | | 66 (=L chain) |
| Anti-human IL-13 (humanised) | Human IL-13 | 12 (=H chain) |
| monoclonal antibody | | 13 (=L chain) |
| Anti-human IL-18 (humanised) | Human IL-18 | 67 (=H chain) |
| monoclonal antibody | | 68 (=L chain) |

[0437] Mature human IL-4 amino acid sequence (without signal sequence) is given in sequence ID number 62.

[0438] Mature human IL-5 amino acid sequence (without signal sequence) is given in sequence ID number 73.

[0439] Mature human IL-13 amino acid sequence (without signal sequence) is given in sequence ID number 63.

[0440] Mature human IL-18 amino acid sequence (without signal sequence) is given in sequence ID number 74.

6.4 Expression and Purification of Trispecific mAb-dAbs

[0441] DNA sequences encoding trispecific mAb-dAb molecules were cloned into mammalian expression vectors using standard molecular biology techniques. The trispecific mAb-dAb expression constructs were transiently transfected into CHOK1 cells, expressed at small scale (3 mls to 150 mls). The expression procedures used to generate the trispecfic mAb-dAbs were the same as those routinely used to express and monoclonal antibodies.

[0442] The trispecific mAb-dAb molecule in the CHO cell supernatant was quantified in a human IgG quantification ELISA. The trispecific mAb-dAb containing CHO cell supernatants were then analysed for activity in IL-4 or IL-13 or IL-18 binding ELISAs and/or binding affinity for IL-4, IL-5, IL-13 and IL-18 by surface plasmon resonance (using BIAcore™)

### Example 7

### Binding of Trispecific mAb-dAbs to Human IL-4, Human IL-13 and Human IL-18 by ELISA

[0443] 7.1 Binding of IL-18mAb-210-474 to IL-4, IL-13 and IL-18 by ELISA IL18 mAb-210-474 containing CHO cell supernatants prepared as described in section 1 (sequence ID numbers 69 and 70), were tested for binding to recombinant E. Coli-expressed human IL-18, recombinant E. Coli-expressed human IL-13 and recombinant E. Coli-expressed human IL-4 in direct binding ELISAs (as described in methods 1, 2 and 3) and these data are illustrated in FIGS. 37, 38 and 39 respectively (IL18mAb-210-474 was prepared and tested a number of times and this has been annotated in the figures as sample 1, sample 2, sample 3, etc).

[0444] The purpose of these figures is to illustrate that IL18mAb-210-474 bound IL-4, IL-13 and IL-18 by ELISA. Purified anti-human IL18 mAb was included in the IL-18 binding ELISA as a positive control for IL-18 binding. The anti-IL-4 dAb (DOM9-112-210) was not tested in the IL-4 binding ELISA as this dAb is not detected by the secondary detection antibody; instead, purified anti-human IL4 mAb (Pascolizumab) was used as a positive control to demonstrate IL-4 binding in this ELISA. The anti-IL-13 dAb (DOM10-53-474) was not tested in the IL-13 binding ELISA as this dAb is not detected by the secondary detection antibody; instead, purified anti-human IL-13 mAb was included as a positive control to demonstrate IL-13 binding in this ELISA. As shown in the figures, negative control mAbs to an irrelevant antigen were included in each binding ELISA.

[0445] In each ELISA the binding curve for IL18mAb-210-474 sample 5 sits apart from the binding curves for the other IL18 mAb-210-474 samples. The reason for this is unknown however, it maybe due to a quantification issue in the human IgG quantification ELISA for this particular IL18mAb-210-474 sample 5.

### 7.2 Binding of Mepo-210-474 to IL-4 and IL-13 by ELISA

[0446] Mepo-210-474 containing CHO cell supernatants prepared as described in section 1 (sequence ID numbers 71 and 72), were tested for binding to recombinant E. Coli-expressed human IL-4 and recombinant E. Coli-expressed human IL-13 in direct binding ELISAs (as described in methods 1 and 2 respectively) and these data are illustrated in FIGS. 40 and 41 respectively (Mepo-210-474 was prepared and tested in quadruplicate and this has been annotated as sample 1, sample 2, sample 3 and sample 4).

[0447] The purpose of these figures is to illustrate that Mepo-210-474 bound IL-4 and IL-13 by ELISA. The anti-IL-4 dAb (DOM9-112-210) was not tested in the IL-4 binding ELISA as this dAb is not detected by the secondary detection antibody; instead, purified anti-human IL4 mAb (Pascolizumab) was used as a positive control to demonstrate IL-4 binding in this ELISA. The anti-IL-13 dAb (DOM10-53-474) was not tested in the IL-13 binding ELISA as this dAb is not detected by the secondary detection antibody; instead, purified anti-human IL-13 mAb was included as a positive control to demonstrate IL-13 binding in this ELISA. As shown in the figures, negative control mAbs to an irrelevant antigen were included in each binding ELISA.

[0448] Mepo-210-474 sample 1 and sample 2 were prepared in one transient transfection experiment and Mepo-210-474 sample 3 and sample 4 were prepared in another separate transient transfection experiment. All four samples bound IL-13 and IL-4 in IL-13 and IL-4 binding ELISAs. However, the reason for the different binding profiles of samples 1 and 2 verses samples 3 and 4 is unknown, but may reflect a difference in the quality of the mAb-dAb (in the supernatant) generated in each transfection experiment.

### Example 8

### Binding of Trispecific mAb-dAbs to Human IL-4, Human IL-5, Human IL-13 and Human IL-18 by Surface Plasmon Resonance (BIAcore™)

[0449] 8.1 Binding of IL-18mAb-210-474 to IL-4, IL-13 and IL-18 by BIAcore™ IL18 mAb-210-474 containing CHO cell supernatants prepared as described in section 1 (sequence ID numbers 69 and 70), were tested for binding to recombinant E. Coli-expressed human IL-4, recombinant E. Coli-expressed human IL-13 and recombinant E. Coli-expressed human IL-18 using BIAcore™ at 25° C. (as described in methods 4, 6 and 7 respectively). These data are illustrated in Table 15 (samples were prepared and tested in triplicate, this has been annotated as sample 1, sample 2 and sample 3).

TABLE 15

| | | | |
|---|---|---|---|
| | | | Binding |
| | On rate | Off rate | affinity, KD |
| Construct | (ka) | (kd) | (nM) |

Binding to IL-18

| | | | |
|---|---|---|---|
| IL18mAb-210-474 (sample 1) | 2.1e6 | 2.3e−5 | 0.011 |
| IL18mAb-210-474 (sample 2) | 2.1e6 | 2.8e−5 | 0.014 |
| IL18mAb-210-474 (sample 3) | 2.1e6 | 2.9e−5 | 0.014 |
| Anti-human IL-18 mAb | 1.9e6 | 6.8e−5 | 0.035 |
| (purified) | | | |

Binding to IL-13

| | | | |
|---|---|---|---|
| IL18mAb-210-474 (sample 1) | 5.8e5 | 5.7e−4 | 0.99 |
| IL18mAb-210-474 (sample 2) | 6.2e5 | 6.1e−4 | 0.99 |
| IL18mAb-210-474 (sample 3) | 7.4e5 | 7.4e−4 | 1.0 |
| Anti-human IL-13 mAb | 1.2e6 | 5.0e−4 | 0.41 |
| (purified) | | | |

Binding to IL-4

| | | | |
|---|---|---|---|
| IL18mAb-210-474 (sample 1) | — | — | very tight binder |
| | | | (unable to determine |
| | | | KD due to positive |
| | | | dissociation effects |
| | | | and sensitivity level of |
| | | | BIAcore ™ technique) |
| IL18mAb-210-474 (sample 2) | — | — | very tight binder |
| | | | (unable to determine |
| | | | KD due to positive |
| | | | dissociation effects |
| | | | and sensitivity level of |
| | | | BIAcore ™ technique) |
| IL18mAb-210-474 (sample 3) | — | — | very tight binder |
| | | | (unable to determine |
| | | | KD due to positive |
| | | | dissociation effects |
| | | | and sensitivity level of |
| | | | BIAcore ™ technique) |
| Pascolizumab (purified) | 4.6e6 | 1.7e−4 | 0.037 |

[0450] IL18mAb-210-474 bound IL-4, IL-13 and IL-18 using BIAcore™. The binding affinity of IL18 mAb-210-474 for IL-18 was approximately equivalent to that of purified anti-human IL18 mAb alone, which was included in this assay as a positive control for IL-18 binding and in order to directly compare to the binding affinity of IL18mAb-210-474. It was not possible to determine the absolute binding affinity of IL18mAb-210-474 for IL-4, due to the fact that the DOM9-112-210 component of this trispecific mAb-dAb bound very tightly to IL-4 and hence the off-rate was too small to determine using BIAcore™. The anti-IL-4 dAb alone (DOM9-112-210) was not tested in this assay as this dAb cannot be captured onto the Protein A or anti-human IgG coated CM5 chip; instead, the anti-human IL4 mAb (Pascolizumab) was included as a positive control to demonstrate IL-4 binding in this assay. The anti-IL-13 dAb alone (DOM10-53-474) was not tested in this assay as this dAb cannot be captured onto the Protein A or anti-human IgG coated CM5 chip; instead, the anti-human IL13 mAb was included as a positive control to demonstrate IL-13 binding in this assay.

### 8.2 Binding of Mepo-210-474 to IL-4, IL-5 and IL-13 by BIAcore™

[0451] Mepo-210-474 containing CHO cell supernatants prepared as described in section 1 (sequence ID numbers 71 and 72), were tested for binding to recombinant E. Coli-expressed human IL-4, recombinant Sf21-expressed human IL-5 and recombinant E. Coli-expressed human IL-13 using BIAcore™ at 25° C. (as described in methods 5, 6 and 7 respectively). These data are illustrated in Table 16.

TABLE 16

| | | | |
|---|---|---|---|
| | | | Binding |
| | On rate | Off rate | affinity, KD |
| Construct | (ka) | (kd) | (nM) |

Binding to IL-5

| | | | |
|---|---|---|---|
| Mepo-210-474 | 3.34e5 | 1.50e−4 | 0.45 |
| Mepolizumab | 3.78e4 | 1.30e−4 | 0.34 |
| (purified) | | | |

Binding to IL-13

| | | | |
|---|---|---|---|
| Mepo-210-474 | 6.38e5 | 1.03e−3 | 1.62 |
| Anti-human IL-13 | 1.51e6 | 5.68e−4 | 0.38 |
| mAb (purified) | | | |

Binding to IL-4

| | | | |
|---|---|---|---|
| Mepo-210-474 | — | — | very tight binder |
| | | | (unable to determine KD |
| | | | due to positive dissociation |
| | | | effects and sensitivity level |
| | | | of BIAcore ™ technique) |
| Pascolizumab | 6.26e6 | 1.43e−4 | 0.02 |
| (purified) | | | |

[0452] Mepo-210-474 bound IL-4, IL-5 and IL-13 using BIAcore™. The binding affinity of Mepo-210-474 for IL-5 was approximately equivalent to that of purified anti-human IL5 mAb (Mepolizumab) alone, which was included in this assay as a positive control for IL-5 binding and in order to directly compare to the binding affinity of Mepo-210-474. It was not possible to determine the absolute binding affinity of Mepo-210-474 for IL-4, due to the fact that the DOM9-112-210 component of this trispecific mAb-dAb bound very tightly to IL-4 and hence the off-rate was too small to determine using BIAcore™. The anti-IL-4 dAb alone (DOM9-112-210) was not tested in this assay as this dAb cannot be captured onto the Protein A or anti-human IgG coated CM5 chip; instead, the anti-human IL4 mAb (Pascolizumab) was included as a positive control to demonstrate IL-4 binding in this assay. The anti-IL-13 dAb alone (DOM10-53-474) was not tested in this assay as this dAb cannot be captured onto the Protein A or anti-human IgG coated CM5 chip; instead, the anti-human IL13 mAb was included as a positive control to demonstrate IL-13 binding in this assay.

### Example 9

### Stoichiometry

[0453] 9.1 Stoichiometry of Binding of IL-4, IL-13 and IL-18 to IL-18mAb-210-474 Using BIAcore™

[0454] IL18 mAb-210-474 containing CHO cell supernatants prepared as described in section 1 (sequence ID numbers 69 and 70), were evaluated for stoichiometry of binding for IL-4, IL-13 and IL-18 using BIAcore™ (as described in method 7). These data are illustrated in Table 17 (R-max is the saturated binding response and this is required to calculate the stoichiometry, as per the given formulae in method 7).

TABLE 17

| Cytokine | Injection position | R-max | Stoichiometry |
|---|---|---|---|
| IL-4 | 1st | 59 | 0.9 |
| IL-4 | 2nd | 56 | 0.9 |
| IL-4 | 3rd | 51 | 0.8 |
| IL-13 | 1st | 74 | 1.6 |
| IL-13 | 2nd | 77 | 1.7 |
| IL-13 | 3rd | 80 | 1.8 |
| IL-18 | 1st | 112 | 1.8 |
| IL-18 | 2nd | 113 | 1.8 |
| IL-18 | 3rd | 110 | 1.7 |

[0455] The stoichiometry data indicated that IL18mAb-210-474 bound approximately two molecules of IL-18, two molecules of IL-13 and only one molecule of IL-4. The anti-IL4 dAb alone (DOM9-112-210) is known to be a dimer in solution state and is only able to bind one molecule of IL-4. It is therefore not unexpected that IL18 mAb-210-474 would bind only one molecule of IL-4. These data indicated that the molecules tested could be fully occupied by the expected number of IL-18, IL-13 and IL-4 molecules. The stoichiometry data also indicated that the order of capture of the cytokines appears to be independent of the order of addition of the cytokines.

Sequences
1. Domain antibodies
Sequence ID number 1 = DOM9-155-25
DIQMTQSPSSLSASVGDRVTITCRASRPISDWLHWYQQKPGKAPKLLIAWASTLDSGVPSRF
SGSGSGTDFTLTISSLQPEDFATYYCLQEGWGPPTFGQGTKVEIKR
Sequence ID number 2 = DOM9-155-147
DIQMTQSPSSLSASVGDRVTITCRASRPISDWLHWYQQKPGKAPKLLIAWASSLYEGVPSRF
SGSGSGTDFTLTISSLQPEDFATYYCLQEGWGPPTFGQGTKVEIKR
Sequence ID number 3 = DOM9-155-154
DIQMTQSPSSLSASVGDRVTITCRASRPISDWLHWYQQKPGKAPKLLIAWASSLQGGVPSRF
SGSGSGTDFTLTISSLQPEDFATYYCLQEGWGPPTFGQGTKVEIKR
Sequence ID number 4 = DOM9-112-210
EVQLLESGGGLVQPGGSLRLSCAASGFTFRNFGMGWVRQAPGKGLEWVSWIISSGTETYYAD
SVKGRFTISRDNSKNTLYLQMNSLRAEDTAVYYCAKSLGRFDYWGQGTLVTVSS
Sequence ID number 5 = DOM10-53-474
GVQLLESGGGLVQPGGSLRLSCAASGFTFAWYDMGWVRQAPGKGLEWVSSIDWHGEVTYYAD
SVKGRFTISRDNSKNTLYLQMNSLRAEDTAVYYCATAEDEPGYDYWGQGTLVTVSS
SEQ ID NO: 60 = DNA sequence of DOM9-155-147
(protein = SEQ ID NO: 2)
GACATCCAGATGACCCAATCACCATCCTCCCTGTCTGCATCTGTAGGAGACCGTGTCACCAT
CACTtGCCGGGCAAGTCGCCCCATtAGCGACTGGTTACATtGGTATCAGCAGAAACCAGGGA
AAGCCCCCAAGCTCCTGATCGCCTGGGCGtCCTCGTTGTACGAGGGGGtCCCATCACGtTTC
AGTGGCAGTGGGTCGGGGACAGATTTCACTCTCACCATCAGCAGTCTGCAACCCGAAGATTT
CGCTACGTACTACTGTTTGCAGGAGGGGTGGGGTCCTCCGACGTTCGGCCAAGGGACCAAGG
TGGAAATCAAACGG
SEQ ID NO: 61 = DNA sequence of DOM9-155-154
(protein = SEQ ID NO: 3)
GACATCCAGATGACCCAATCACCATCCTCCCTGTCTGCATCTGTAGGAGACCGTGTCACCAT
CACTTGCCGGGCAAGTCGCCCCATTAGCGACTGGTTACATTGGTATCAGCAGAAACCAGGGA
AAGCCCCCAAGCTCCTGATCGCCTGGGCGTCCAGCTTGCAGGGGGGGGTCCCATCACGTTTC
AGTGGCAGTGGGTCGGGGACAGATTTCACTCTCACCATCAGCAGTCTGCAACCCGAAGATTT
CGCTACGTACTACTGTTTGCAGGAGGGGTGGGGTCCTCCGACGTTCGGCCAAGGGACCAAGG
TGGAAATCAAACGG
2. Linkers
Sequence ID number 6 = G4S linker
GGGGS
Sequence ID number 7 = linker
TVAAPS
Sequence ID number 8 = linker
ASTKGPT
Sequence ID number 9 = linker
ASTKGPS
Sequence ID number 10 = linker
EPKSCDKTHTCPPCP
Sequence ID number 11 = linker
ELQLEESCAEAQDGELDG
3. Monoclonal antibodies
Sequence ID number 12 = Anti-human IL13 mAb (H chain)
QVQLVQSGAEVKKPGSSVKVSCKASGFYIKDTYMHWVRQAPGQGLEWMGTIDPANGNTKYVP
KFQGRVTITADESTSTAYMELSSLRSEDTAVYYCARSIYDDYHYDDYYAMDYWGQGTLVTVS
SASTKGPSVFPLAPSSKSTSGGTAALGCLVKDYFPEPVTVSWNSGALTSGVHTFPAVLQSSG
LYSLSSVVTVPSSSLGTQTYICNVNHKPSNTKVDKKVEPKSCDKTHTCPPCPAPELLGGPSV
FLFPPKPKDTLMISRTPEVTCVVVDVSHEDPEVKFNWYVDGVEVHNAKTKPREEQYNSTYRV
VSVLTVLHQDWLNGKEYKCKVSNKALPAPIEKTISKAKGQPREPQVYTLPPSRDELTKNQVS
LTCLVKGFYPSDIAVEWESNGQPENNYKTTPPVLDSDGSFFLYSKLTVDKSRWQQGNVFSCS
VMHEALHNHYTQKSLSLSPGK
Sequence ID number 13 = Anti-human IL13 mAb (L chain)
DIVMTQSPLSLPVTPGEPASISCRSSQNIVHINGNTYLEWYLQKPGQSPRLLIYKISDRFSG
VPDRFSGSGSGTDFTLKISRVEADDVGIYYCFQGSHVPWTFGQGTKLEIKRTVAAPSVFIFP
PSDEQLKSGTASVVCLLNNFYPREAKVQWKVDNALQSGNSQESVTEQDSKDSTYSLSSTLTL
SKADYEKHKVYACEVTHQGLSSPVTKSFNRGEC
Sequence ID number 14 = Pascolizumab (H chain)
QVTLRESGPALVKPTQTLTLTCTFSGFSLSTSGMGVSWIRQPPGKGLEWLAHIYWDDDKRYN
PSLKSRLTISKDTSRNQVVLTMTNMDPVDTATYYCARRETVFYWYFDVWGRGTLVTVSSAST
KGPSVFPLAPSSKSTSGGTAALGCLVKDYFPEPVTVSWNSGALTSGVHTFPAVLQSSGLYSL
SSVVTVPSSSLGTQTYICNVNHKPSNTKVDKKVEPKSCDKTHTCPPCPAPELLGGPSVFLFP
PKPKDTLMISRTPEVTCVVVDVSHEDPEVKFNWYVDGVEVHNAKTKPREEQYNSTYRVVSVL
TVLHQDWLNGKEYKCKVSNKALPAPIEKTISKAKGQPREPQVYTLPPSRDELTKNQVSLTCL
VKGFYPSDIAVEWESNGQPENNYKTTPPVLDSDGSFFLYSKLTVDKSRWQQGNVFSCSVMHE
ALHNHYTQKSLSLSPGK
Sequence ID number 15 = Pascolizumab (L chain)
DIVLTQSPSSLSASVGDRVTITCKASQSVDYDGDSYMNWYQQKPGKAPKLLIYAASNLESGI
PSRFSGSGSGTDFTFTISSLQPEDIATYYCQQSNEDPPTFGQGTKVEIKRTVAAPSVFIFPP
SDEQLKSGTASVVCLLNNFYPREAKVQWKVDNALQSGNSQESVTEQDSKDSTYSLSSTLTLS
KADYEKHKVYACEVTHQGLSSPVTKSFNRGEC
Sequence ID number 65 = Mepolizumab (H chain)
QVTLRESGPALVKPTQTLTLTCTVSGFSLTSYSVHWVRQPPGKGLEWLGVIWASGGTDYNSA
LMSRLSISKDTSRNQVVLTMTNMDPVDTATYYCARDPPSSLLRLDYWGRGTPVTVSSASTKG
PSVFPLAPSSKSTSGGTAALGCLVKDYFPEPVTVSWNSGALTSGVHTFPAVLQSSGLYSLSS
VVTVPSSSLGTQTYICNVNHKPSNTKVDKKVEPKSCDKTHTCPPCPAPELLGGPSVFLFPPK
PKDTLMISRTPEVTCVVVDVSHEDPEVKFNWYVDGVEVHNAKTKPREEQYNSTYRVVSVLTV
LHQDWLNGKEYKCKVSNKALPAPIEKTISKAKGQPREPQVYTLPPSRDELTKNQVSLTCLVK
GFYPSDIAVEWESNGQPENNYKTTPPVLDSDGSFFLYSKLTVDKSRWQQGNVFSCSVMHEAL
HNHYTQKSLSLSPGK
Sequence ID number 66 = Mepolizumab (L chain)
DIVMTQSPDSLAVSLGERATINCKSSQSLLNSGNQKNYLAWYQQKPGQPPKLLIYGASTRES
GVPDRFSGSGSGTDFTLTISSLQAEDVAVYYCQNVHSFPFTFGGGTKLEIKRTVAAPSVFIF
PPSDEQLKSGTASVVCLLNNFYPREAKVQWKVDNALQSGNSQESVTEQDSKDSTYSLSSTLT
LSKADYEKHKVYACEVTHQGLSSPVTKSFNRGEC
Sequence ID number 67 = Anti-human IL-18 mAb (H chain)
QVQLVQSGAEVKKPGASVKVSCKVSGEISTGYYFHWVRQAPGKGLEWMGRIDPEDDSTKYAE
RFKDRVTMTEDTSTDTAYMELSSLRSEDTAVYYCTTWRIYRDSSGRPFYVMDAWGQGTLVTV
SSASTKGPSVFPLAPSSKSTSGGTAALGCLVKDYFPEPVTVSWNSGALTSGVHTFPAVLQSS
GLYSLSSVVTVPSSSLGTQTYICNVNHKPSNTKVDKKVEPKSCDKTHTCPPCPAPELLGGPS
VFLFPPKPKDTLMISRTPEVTCVVVDVSHEDPEVKFNWYVDGVEVHNAKTKPREEQYNSTYR
VVSVLTVLHQDWLNGKEYKCKVSNKALPAPIEKTISKAKGQPREPQVYTLPPSRDELTKNQV
SLTCLVKGFYPSDIAVEWESNGQPENNYKTTPPVLDSDGSFFLYSKLTVDKSRWQQGNVFSC
SVMHEALHNHYTQKSLSLSPGK
Sequence ID number 68 = Anti-human IL-18 mAb (L chain)
DIQMTQSPSSVSASVGDRVTITCLASEDIYTYLTWYQQKPGKAPKLLIYGANKLQDGVPSRF
SGSGSGTDYTLTISSLQPEDFATYYCLQGSKFPLTFGQGTKLEIKRTVAAPSVFIFPPSDEQ
LKSGTASVVCLLNNFYPREAKVQWKVDNALQSGNSQESVTEQDSKDSTYSLSSTLTLSKADY
EKHKVYACEVTHQGLSSPVTKSFNRGEC
4. Bispecific mAb-dAbs
NB, the underlined portion of the sequence corresponds
to the linker.
Sequence ID number 16 = 586H-25 (H chain)
QVQLVQSGAEVKKPGSSVKVSCKASGFYIKDTYMHWVRQAPGQGLEWMGTIDPANGNTKYVP
KFQGRVTITADESTSTAYMELSSLRSEDTAVYYCARSIYDDYHYDDYYAMDYWGQGTLVTVS
SASTKGPSVFPLAPSSKSTSGGTAALGCLVKDYFPEPVTVSWNSGALTSGVHTFPAVLQSSG
LYSLSSVVTVPSSSLGTQTYICNVNHKPSNTKVDKKVEPKSCDKTHTCPPCPAPELLGGPSV
FLFPPKPKDTLMISRTPEVTCVVVDVSHEDPEVKFNWYVDGVEVHNAKTKPREEQYNSTYRV
VSVLTVLHQDWLNGKEYKCKVSNKALPAPIEKTISKAKGQPREPQVYTLPPSRDELTKNQVS
LTCLVKGFYPSDIAVEWESNGQPENNYKTTPPVLDSDGSFFLYSKLTVDKSRWQQGNVFSCS
VMHEALHNHYTQKSLSLSPGKGSDIQMTQSPSSLSASVGDRVTITCRASRPISDWLHWYQQK
PGKAPKLLIAWASTLDSGVPSRFSGSGSGTDFTLTISSLQPEDFATYYCLQEGWGPPTFGQG
TKVEIKR
Sequence ID number 17 = 586H-147 (H chain)
QVQLVQSGAEVKKPGSSVKVSCKASGFYIKDTYMHWVRQAPGQGLEWMGTIDPANGNTKYVP
KFQGRVTITADESTSTAYMELSSLRSEDTAVYYCARSIYDDYHYDDYYAMDYWGQGTLVTVS
SASTKGPSVFPLAPSSKSTSGGTAALGCLVKDYFPEPVTVSWNSGALTSGVHTFPAVLQSSG
LYSLSSVVTVPSSSLGTQTYICNVNHKPSNTKVDKKVEPKSCDKTHTCPPCPAPELLGGPSV
FLFPPKPKDTLMISRTPEVTCVVVDVSHEDPEVKFNWYVDGVEVHNAKTKPREEQYNSTYRV
VSVLTVLHQDWLNGKEYKCKVSNKALPAPIEKTISKAKGQPREPQVYTLPPSRDELTKNQVS
LTCLVKGFYPSDIAVEWESNGQPENNYKTTPPVLDSDGSFFLYSKLTVDKSRWQQGNVFSCS
VMHEALHNHYTQKSLSLSPGKGSDIQMTQSPSSLSASVGDRVTITCRASRPISDWLHWYQQK
PGKAPKLLIAWASSLYEGVPSRFSGSGSGTDFTLTISSLQPEDFATYYCLQEGWGPPTFGQG
TKVEIKR
Sequence ID number 18 = 586H-154 (H chain)
QVQLVQSGAEVKKPGSSVKVSCKASGFYIKDTYMHWVRQAPGQGLEWMGTIDPANGNTKYVP
KFQGRVTITADESTSTAYMELSSLRSEDTAVYYCARSIYDDYHYDDYYAMDYWGQGTLVTVS
SASTKGPSVFPLAPSSKSTSGGTAALGCLVKDYFPEPVTVSWNSGALTSGVHTFPAVLQSSG
LYSLSSVVTVPSSSLGTQTYICNVNHKPSNTKVDKKVEPKSCDKTHTCPPCPAPELLGGPSV
FLFPPKPKDTLMISRTPEVTCVVVDVSHEDPEVKFNWYVDGVEVHNAKTKPREEQYNSTYRV
VSVLTVLHQDWLNGKEYKCKVSNKALPAPIEKTISKAKGQPREPQVYTLPPSRDELTKNQVS
LTCLVKGFYPSDIAVEWESNGQPENNYKTTPPVLDSDGSFFLYSKLTVDKSRWQQGNVFSCS
VMHEALHNHYTQKSLSLSPGKGSDIQMTQSPSSLSASVGDRVTITCRASRPISDWLHWYQQK
PGKAPKLLIAWASSLQGGVPSRFSGSGSGTDFTLTISSLQPEDFATYYCLQEGWGPPTFGQG
TKVEIKR
Sequence ID number 19 = 586H-210 (H chain)
QVQLVQSGAEVKKPGSSVKVSCKASGFYIKDTYMHWVRQAPGQGLEWMGTIDPANGNTKYVP
KFQGRVTITADESTSTAYMELSSLRSEDTAVYYCARSIYDDYHYDDYYAMDYWGQGTLVTVS
SASTKGPSVFPLAPSSKSTSGGTAALGCLVKDYFPEPVTVSWNSGALTSGVHTFPAVLQSSG
LYSLSSVVTVPSSSLGTQTYICNVNHKPSNTKVDKKVEPKSCDKTHTCPPCPAPELLGGPSV
FLFPPKPKDTLMISRTPEVTCVVVDVSHEDPEVKFNWYVDGVEVHNAKTKPREEQYNSTYRV
VSVLTVLHQDWLNGKEYKCKVSNKALPAPIEKTISKAKGQPREPQVYTLPPSRDELTKNQVS
LTCLVKGFYPSDIAVEWESNGQPENNYKTTPPVLDSDGSFFLYSKLTVDKSRWQQGNVFSCS
VMHEALHNHYTQKSLSLSPGKGSEVQLLESGGGLVQPGGSLRLSCAASGFTFRNFGMGWVRQ
APGKGLEWVSWIISSGTETYYADSVKGRFTISRDNSKNTLYLQMNSLRAEDTAVYYCAKSLG
RFDYWGQGTLVTVSS
Sequence ID number 20 = 586H-G4S-25 (H chain)
QVQLVQSGAEVKKPGSSVKVSCKASGFYIKDTYMHWVRQAPGQGLEWMGTIDPANGNTKYVP
KFQGRVTITADESTSTAYMELSSLRSEDTAVYYCARSIYDDYHYDDYYAMDYWGQGTLVTVS
SASTKGPSVFPLAPSSKSTSGGTAALGCLVKDYFPEPVTVSWNSGALTSGVHTFPAVLQSSG
LYSLSSVVTVPSSSLGTQTYICNVNHKPSNTKVDKKVEPKSCDKTHTCPPCPAPELLGGPSV
FLFPPKPKDTLMISRTPEVTCVVVDVSHEDPEVKFNWYVDGVEVHNAKTKPREEQYNSTYRV
VSVLTVLHQDWLNGKEYKCKVSNKALPAPIEKTISKAKGQPREPQVYTLPPSRDELTKNQVS
LTCLVKGFYPSDIAVEWESNGQPENNYKTTPPVLDSDGSFFLYSKLTVDKSRWQQGNVFSCS
VMHEALHNHYTQKSLSLSPGKGGGGSDIQMTQSPSSLSASVGDRVTITCRASRPISDWLHWY
QQKPGKAPKLLIAWASTLDSGVPSRFSGSGSGTDFTLTISSLQPEDFATYYCLQEGWGPPTF
GQGTKVEIKR
Sequence ID number 21 = 586H-G4S-147 (H chain)
QVQLVQSGAEVKKPGSSVKVSCKASGFYIKDTYMHWVRQAPGQGLEWMGTIDPANGNTKYVP
KFQGRVTITADESTSTAYMELSSLRSEDTAVYYCARSIYDDYHYDDYYAMDYWGQGTLVTVS
SASTKGPSVFPLAPSSKSTSGGTAALGCLVKDYFPEPVTVSWNSGALTSGVHTFPAVLQSSG
LYSLSSVVTVPSSSLGTQTYICNVNHKPSNTKVDKKVEPKSCDKTHTCPPCPAPELLGGPSV
FLFPPKPKDTLMISRTPEVTCVVVDVSHEDPEVKFNWYVDGVEVHNAKTKPREEQYNSTYRV
VSVLTVLHQDWLNGKEYKCKVSNKALPAPIEKTISKAKGQPREPQVYTLPPSRDELTKNQVS
LTCLVKGFYPSDIAVEWESNGQPENNYKTTPPVLDSDGSFFLYSKLTVDKSRWQQGNVFSCS
VMHEALHNHYTQKSLSLSPGKGGGGSDIQMTQSPSSLSASVGDRVTITCRASRPISDWLHWY
QQKPGKAPKLLIAWASSLYEGVPSRFSGSGSGTDFTLTISSLQPEDFATYYCLQEGWGPPTF
GQGTKVEIKR
Sequence ID number 22 = 586H-G4S-154 (H chain)
QVQLVQSGAEVKKPGSSVKVSCKASGFYIKDTYMHWVRQAPGQGLEWMGTIDPANGNTKYVP
KFQGRVTITADESTSTAYMELSSLRSEDTAVYYCARSIYDDYHYDDYYAMDYWGQGTLVTVS
SASTKGPSVFPLAPSSKSTSGGTAALGCLVKDYFPEPVTVSWNSGALTSGVHTFPAVLQSSG
LYSLSSVVTVPSSSLGTQTYICNVNHKPSNTKVDKKVEPKSCDKTHTCPPCPAPELLGGPSV
FLFPPKPKDTLMISRTPEVTCVVVDVSHEDPEVKFNWYVDGVEVHNAKTKPREEQYNSTYRV
VSVLTVLHQDWLNGKEYKCKVSNKALPAPIEKTISKAKGQPREPQVYTLPPSRDELTKNQVS
LTCLVKGFYPSDIAVEWESNGQPENNYKTTPPVLDSDGSFFLYSKLTVDKSRWQQGNVFSCS
VMHEALHNHYTQKSLSLSPGKGGGGSDIQMTQSPSSLSASVGDRVTITCRASRPISDWLHWY
QQKPGKAPKLLIAWASSLQGGVPSRFSGSGSGTDFTLTISSLQPEDFATYYCLQEGWGPPTF
GQGTKVEIKR
Sequence ID number 23 = 586H-G4S-210 (H chain)
QVQLVQSGAEVKKPGSSVKVSCKASGFYIKDTYMHWVRQAPGQGLEWMGTIDPANGNTKYVP
KFQGRVTITADESTSTAYMELSSLRSEDTAVYYCARSIYDDYHYDDYYAMDYWGQGTLVTVS
SASTKGPSVFPLAPSSKSTSGGTAALGCLVKDYFPEPVTVSWNSGALTSGVHTFPAVLQSSG
LYSLSSVVTVPSSSLGTQTYICNVNHKPSNTKVDKKVEPKSCDKTHTCPPCPAPELLGGPSV
FLFPPKPKDTLMISRTPEVTCVVVDVSHEDPEVKFNWYVDGVEVHNAKTKPREEQYNSTYRV
VSVLTVLHQDWLNGKEYKCKVSNKALPAPIEKTISKAKGQPREPQVYTLPPSRDELTKNQVS
LTCLVKGFYPSDIAVEWESNGQPENNYKTTPPVLDSDGSFFLYSKLTVDKSRWQQGNVFSCS
VMHEALHNHYTQKSLSLSPGKGGGGSEVQLLESGGGLVQPGGSLRLSCAASGFTFRNFGMGW
VRQAPGKGLEWVSWIISSGTETYYADSVKGRFTISRDNSKNTLYLQMNSLRAEDTAVYYCAK
SLGRFDYWGQGTLVTVSS
Sequence ID number 24 = 586H-TVAAPS-25 (H chain)
QVQLVQSGAEVKKPGSSVKVSCKASGFYIKDTYMHWVRQAPGQGLEWMGTIDPANGNTKYVP
KFQGRVTITADESTSTAYMELSSLRSEDTAVYYCARSIYDDYHYDDYYAMDYWGQGTLVTVS
SASTKGPSVFPLAPSSKSTSGGTAALGCLVKDYFPEPVTVSWNSGALTSGVHTFPAVLQSSG
LYSLSSVVTVPSSSLGTQTYICNVNHKPSNTKVDKKVEPKSCDKTHTCPPCPAPELLGGPSV
FLFPPKPKDTLMISRTPEVTCVVVDVSHEDPEVKFNWYVDGVEVHNAKTKPREEQYNSTYRV
VSVLTVLHQDWLNGKEYKCKVSNKALPAPIEKTISKAKGQPREPQVYTLPPSRDELTKNQVS
LTCLVKGFYPSDIAVEWESNGQPENNYKTTPPVLDSDGSFFLYSKLTVDKSRWQQGNVFSCS
VMHEALHNHYTQKSLSLSPGKTVAAPSGSDIQMTQSPSSLSASVGDRVTITCRASRPISDWL
HWYQQKPGKAPKLLIAWASTLDSGVPSRFSGSGSGTDFTLTISSLQPEDFATYYCLQEGWGP
PTFGQGTKVEIKR
Sequence ID number 25 = 586H-TVAAPS-147 (H chain)
QVQLVQSGAEVKKPGSSVKVSCKASGFYIKDTYMHWVRQAPGQGLEWMGTIDPANGNTKYVP
KFQGRVTITADESTSTAYMELSSLRSEDTAVYYCARSIYDDYHYDDYYAMDYWGQGTLVTVS
SASTKGPSVFPLAPSSKSTSGGTAALGCLVKDYFPEPVTVSWNSGALTSGVHTFPAVLQSSG
LYSLSSVVTVPSSSLGTQTYICNVNHKPSNTKVDKKVEPKSCDKTHTCPPCPAPELLGGPSV
FLFPPKPKDTLMISRTPEVTCVVVDVSHEDPEVKFNWYVDGVEVHNAKTKPREEQYNSTYRV
VSVLTVLHQDWLNGKEYKCKVSNKALPAPIEKTISKAKGQPREPQVYTLPPSRDELTKNQVS
LTCLVKGFYPSDIAVEWESNGQPENNYKTTPPVLDSDGSFFLYSKLTVDKSRWQQGNVFSCS
VMHEALHNHYTQKSLSLSPGKTVAAPSGSDIQMTQSPSSLSASVGDRVTITCRASRPISDWL
HWYQQKPGKAPKLLIAWASSLYEGVPSRFSGSGSGTDFTLTISSLQPEDFATYYCLQEGWGP
PTFGQGTKVEIKR
Sequence ID number 26 = 586H-TVAAPS-154 (H chain)
QVQLVQSGAEVKKPGSSVKVSCKASGFYIKDTYMHWVRQAPGQGLEWMGTIDPANGNTKYVP
KFQGRVTITADESTSTAYMELSSLRSEDTAVYYCARSIYDDYHYDDYYAMDYWGQGTLVTVS
SASTKGPSVFPLAPSSKSTSGGTAALGCLVKDYFPEPVTVSWNSGALTSGVHTFPAVLQSSG
LYSLSSVVTVPSSSLGTQTYICNVNHKPSNTKVDKKVEPKSCDKTHTCPPCPAPELLGGPSV
FLFPPKPKDTLMISRTPEVTCVVVDVSHEDPEVKFNWYVDGVEVHNAKTKPREEQYNSTYRV
VSVLTVLHQDWLNGKEYKCKVSNKALPAPIEKTISKAKGQPREPQVYTLPPSRDELTKNQVS
LTCLVKGFYPSDIAVEWESNGQPENNYKTTPPVLDSDGSFFLYSKLTVDKSRWQQGNVFSCS
VMHEALHNHYTQKSLSLSPGKTVAAPSGSDIQMTQSPSSLSASVGDRVTITCRASRPISDWL
HWYQQKPGKAPKLLIAWASSLQGGVPSRFSGSGSGTDFTLTISSLQPEDFATYYCLQEGWGP
PTFGQGTKVEIKR
Sequence ID number 27 = 586H-TVAAPS-210 (H chain)
QVQLVQSGAEVKKPGSSVKVSCKASGFYIKDTYMHWVRQAPGQGLEWMGTIDPANGNTKYVP
KFQGRVTITADESTSTAYMELSSLRSEDTAVYYCARSIYDDYHYDDYYAMDYWGQGTLVTVS
SASTKGPSVFPLAPSSKSTSGGTAALGCLVKDYFPEPVTVSWNSGALTSGVHTFPAVLQSSG
LYSLSSVVTVPSSSLGTQTYICNVNHKPSNTKVDKKVEPKSCDKTHTCPPCPAPELLGGPSV
FLFPPKPKDTLMISRTPEVTCVVVDVSHEDPEVKFNWYVDGVEVHNAKTKPREEQYNSTYRV
VSVLTVLHQDWLNGKEYKCKVSNKALPAPIEKTISKAKGQPREPQVYTLPPSRDELTKNQVS
LTCLVKGFYPSDIAVEWESNGQPENNYKTTPPVLDSDGSFFLYSKLTVDKSRWQQGNVFSCS
VMHEALHNHYTQKSLSLSPGKTVAAPSGSEVQLLESGGGLVQPGGSLRLSCAASGFTFRNFG
MGWVRQAPGKGLEWVSWIISSGTETYYADSVKGRFTISRDNSKNTLYLQMNSLRAEDTAVYY
CAKSLGRFDYWGQGTLVTVSS
Sequence ID number 28 = 586H-ASTKG-25 (H chain)
QVQLVQSGAEVKKPGSSVKVSCKASGFYIKDTYMHWVRQAPGQGLEWMGTIDPANGNTKYVP
KFQGRVTITADESTSTAYMELSSLRSEDTAVYYCARSIYDDYHYDDYYAMDYWGQGTLVTVS
SASTKGPSVFPLAPSSKSTSGGTAALGCLVKDYFPEPVTVSWNSGALTSGVHTFPAVLQSSG
LYSLSSVVTVPSSSLGTQTYICNVNHKPSNTKVDKKVEPKSCDKTHTCPPCPAPELLGGPSV
FLFPPKPKDTLMISRTPEVTCVVVDVSHEDPEVKFNWYVDGVEVHNAKTKPREEQYNSTYRV
VSVLTVLHQDWLNGKEYKCKVSNKALPAPIEKTISKAKGQPREPQVYTLPPSRDELTKNQVS
LTCLVKGFYPSDIAVEWESNGQPENNYKTTPPVLDSDGSFFLYSKLTVDKSRWQQGNVFSCS
VMHEALHNHYTQKSLSLSPGKGSASTKGPTGSDIQMTQSPSSLSASVGDRVTITCRASRPIS
DWLHWYQQKPGKAPKLLIAWASTLDSGVPSRFSGSGSGTDFTLTISSLQPEDFATYYCLQEG
WGPPTFGQGTKVEIKR
Sequence ID number 29 = 586H-ASTKG-147 (H chain)
QVQLVQSGAEVKKPGSSVKVSCKASGFYIKDTYMHWVRQAPGQGLEWMGTIDPANGNTKYVP
KFQGRVTITADESTSTAYMELSSLRSEDTAVYYCARSIYDDYHYDDYYAMDYWGQGTLVTVS
SASTKGPSVFPLAPSSKSTSGGTAALGCLVKDYFPEPVTVSWNSGALTSGVHTFPAVLQSSG
LYSLSSVVTVPSSSLGTQTYICNVNHKPSNTKVDKKVEPKSCDKTHTCPPCPAPELLGGPSV
FLFPPKPKDTLMISRTPEVTCVVVDVSHEDPEVKFNWYVDGVEVHNAKTKPREEQYNSTYRV
VSVLTVLHQDWLNGKEYKCKVSNKALPAPIEKTISKAKGQPREPQVYTLPPSRDELTKNQVS
LTCLVKGFYPSDIAVEWESNGQPENNYKTTPPVLDSDGSFFLYSKLTVDKSRWQQGNVFSCS
VMHEALHNHYTQKSLSLSPGKGSASTKGPTGSDIQMTQSPSSLSASVGDRVTITCRASRPIS
DWLHWYQQKPGKAPKLLIAWASSLYEGVPSRFSGSGSGTDFTLTISSLQPEDFATYYCLQEG
WGPPTFGQGTKVEIKR
Sequence ID number 30 = 586H-ASTKG-154 (H chain)
QVQLVQSGAEVKKPGSSVKVSCKASGFYIKDTYMHWVRQAPGQGLEWMGTIDPANGNTKYVP
KFQGRVTITADESTSTAYMELSSLRSEDTAVYYCARSIYDDYHYDDYYAMDYWGQGTLVTVS
SASTKGPSVFPLAPSSKSTSGGTAALGCLVKDYFPEPVTVSWNSGALTSGVHTFPAVLQSSG
LYSLSSVVTVPSSSLGTQTYICNVNHKPSNTKVDKKVEPKSCDKTHTCPPCPAPELLGGPSV
FLFPPKPKDTLMISRTPEVTCVVVDVSHEDPEVKFNWYVDGVEVHNAKTKPREEQYNSTYRV
VSVLTVLHQDWLNGKEYKCKVSNKALPAPIEKTISKAKGQPREPQVYTLPPSRDELTKNQVS
LTCLVKGFYPSDIAVEWESNGQPENNYKTTPPVLDSDGSFFLYSKLTVDKSRWQQGNVFSCS
VMHEALHNHYTQKSLSLSPGKGSASTKGPTGSDIQMTQSPSSLSASVGDRVTITCRASRPIS
DWLHWYQQKPGKAPKLLIAWASSLQGGVPSRFSGSGSGTDFTLTISSLQPEDFATYYCLQEG
WGPPTFGQGTKVEIKR
Sequence ID number 31 = 586H-ASTKG-210 (H chain)
QVQLVQSGAEVKKPGSSVKVSCKASGFYIKDTYMHWVRQAPGQGLEWMGTIDPANGNTKYVP
KFQGRVTITADESTSTAYMELSSLRSEDTAVYYCARSIYDDYHYDDYYAMDYWGQGTLVTVS
SASTKGPSVFPLAPSSKSTSGGTAALGCLVKDYFPEPVTVSWNSGALTSGVHTFPAVLQSSG
LYSLSSVVTVPSSSLGTQTYICNVNHKPSNTKVDKKVEPKSCDKTHTCPPCPAPELLGGPSV
FLFPPKPKDTLMISRTPEVTCVVVDVSHEDPEVKFNWYVDGVEVHNAKTKPREEQYNSTYRV
VSVLTVLHQDWLNGKEYKCKVSNKALPAPIEKTISKAKGQPREPQVYTLPPSRDELTKNQVS
LTCLVKGFYPSDIAVEWESNGQPENNYKTTPPVLDSDGSFFLYSKLTVDKSRWQQGNVFSCS
VMHEALHNHYTQKSLSLSPGKGSASTKGPTGSEVQLLESGGGLVQPGGSLRLSCAASGFTFR
NFGMGWVRQAPGKGLEWVSWIISSGTETYYADSVKGRFTISRDNSKNTLYLQMNSLRAEDTA
VYYCAKSLGRFDYWGQGTLVTVSS
Sequence ID number 32 = 586H-EPKSC-25 (H chain)
QVQLVQSGAEVKKPGSSVKVSCKASGFYIKDTYMHWVRQAPGQGLEWMGTIDPANGNTKYVP
KFQGRVTITADESTSTAYMELSSLRSEDTAVYYCARSIYDDYHYDDYYAMDYWGQGTLVTVS
SASTKGPSVFPLAPSSKSTSGGTAALGCLVKDYFPEPVTVSWNSGALTSGVHTFPAVLQSSG
LYSLSSVVTVPSSSLGTQTYICNVNHKPSNTKVDKKVEPKSCDKTHTCPPCPAPELLGGPSV
FLFPPKPKDTLMISRTPEVTCVVVDVSHEDPEVKFNWYVDGVEVHNAKTKPREEQYNSTYRV
VSVLTVLHQDWLNGKEYKCKVSNKALPAPIEKTISKAKGQPREPQVYTLPPSRDELTKNQVS
LTCLVKGFYPSDIAVEWESNGQPENNYKTTPPVLDSDGSFFLYSKLTVDKSRWQQGNVFSCS
VMHEALHNHYTQKSLSLSPGKGSEPKSCDKTHTCPPCPGSDIQMTQSPSSLSASVGDRVTIT
CRASRPISDWLHWYQQKPGKAPKLLIAWASTLDSGVPSRFSGSGSGTDFTLTISSLQPEDFA
TYYCLQEGWGPPTFGQGTKVEIKR
Sequence ID number 33 = 586H-EPKSC-147 (H chain)
QVQLVQSGAEVKKPGSSVKVSCKASGFYIKDTYMHWVRQAPGQGLEWMGTIDPANGNTKYVP
KFQGRVTITADESTSTAYMELSSLRSEDTAVYYCARSIYDDYHYDDYYAMDYWGQGTLVTVS
SASTKGPSVFPLAPSSKSTSGGTAALGCLVKDYFPEPVTVSWNSGALTSGVHTFPAVLQSSG
LYSLSSVVTVPSSSLGTQTYICNVNHKPSNTKVDKKVEPKSCDKTHTCPPCPAPELLGGPSV
FLFPPKPKDTLMISRTPEVTCVVVDVSHEDPEVKFNWYVDGVEVHNAKTKPREEQYNSTYRV
VSVLTVLHQDWLNGKEYKCKVSNKALPAPIEKTISKAKGQPREPQVYTLPPSRDELTKNQVS
LTCLVKGFYPSDIAVEWESNGQPENNYKTTPPVLDSDGSFFLYSKLTVDKSRWQQGNVFSCS
VMHEALHNHYTQKSLSLSPGKGSEPKSCDKTHTCPPCPGSDIQMTQSPSSLSASVGDRVTIT
CRASRPISDWLHWYQQKPGKAPKLLIAWASSLYEGVPSRFSGSGSGTDFTLTISSLQPEDFA
TYYCLQEGWGPPTFGQGTKVEIKR
Sequence ID number 34 = 586H-EPKSC-154 (H chain)
QVQLVQSGAEVKKPGSSVKVSCKASGFYIKDTYMHWVRQAPGQGLEWMGTIDPANGNTKYVP
KFQGRVTITADESTSTAYMELSSLRSEDTAVYYCARSIYDDYHYDDYYAMDYWGQGTLVTVS
SASTKGPSVFPLAPSSKSTSGGTAALGCLVKDYFPEPVTVSWNSGALTSGVHTFPAVLQSSG
LYSLSSVVTVPSSSLGTQTYICNVNHKPSNTKVDKKVEPKSCDKTHTCPPCPAPELLGGPSV
FLFPPKPKDTLMISRTPEVTCVVVDVSHEDPEVKFNWYVDGVEVHNAKTKPREEQYNSTYRV
VSVLTVLHQDWLNGKEYKCKVSNKALPAPIEKTISKAKGQPREPQVYTLPPSRDELTKNQVS
LTCLVKGFYPSDIAVEWESNGQPENNYKTTPPVLDSDGSFFLYSKLTVDKSRWQQGNVFSCS
VMHEALHNHYTQKSLSLSPGKGSEPKSCDKTHTCPPCPGSDIQMTQSPSSLSASVGDRVTIT
CRASRPISDWLHWYQQKPGKAPKLLIAWASSLQGGVPSRFSGSGSGTDFTLTISSLQPEDFA
TYYCLQEGWGPPTFGQGTKVEIKR
Sequence ID number 35 = 586H-EPKSC-210 (H chain)
QVQLVQSGAEVKKPGSSVKVSCKASGFYIKDTYMHWVRQAPGQGLEWMGTIDPANGNTKYVP
KFQGRVTITADESTSTAYMELSSLRSEDTAVYYCARSIYDDYHYDDYYAMDYWGQGTLVTVS
SASTKGPSVFPLAPSSKSTSGGTAALGCLVKDYFPEPVTVSWNSGALTSGVHTFPAVLQSSG
LYSLSSVVTVPSSSLGTQTYICNVNHKPSNTKVDKKVEPKSCDKTHTCPPCPAPELLGGPSV
FLFPPKPKDTLMISRTPEVTCVVVDVSHEDPEVKFNWYVDGVEVHNAKTKPREEQYNSTYRV
VSVLTVLHQDWLNGKEYKCKVSNKALPAPIEKTISKAKGQPREPQVYTLPPSRDELTKNQVS
LTCLVKGFYPSDIAVEWESNGQPENNYKTTPPVLDSDGSFFLYSKLTVDKSRWQQGNVFSCS
VMHEALHNHYTQKSLSLSPGKGSEPKSCDKTHTCPPCPGSEVQLLESGGGLVQPGGSLRLSC
AASGFTFRNFGMGWVRQAPGKGLEWVSWIISSGTETYYADSVKGRFTISRDNSKNTLYLQMN
SLRAEDTAVYYCAKSLGRFDYWGQGTLVTVSS
Sequence ID number 36 = 586H-ELQLE-25 (H chain)
QVQLVQSGAEVKKPGSSVKVSCKASGFYIKDTYMHWVRQAPGQGLEWMGTIDPANGNTKYVP
KFQGRVTITADESTSTAYMELSSLRSEDTAVYYCARSIYDDYHYDDYYAMDYWGQGTLVTVS
SASTKGPSVFPLAPSSKSTSGGTAALGCLVKDYFPEPVTVSWNSGALTSGVHTFPAVLQSSG
LYSLSSVVTVPSSSLGTQTYICNVNHKPSNTKVDKKVEPKSCDKTHTCPPCPAPELLGGPSV
FLFPPKPKDTLMISRTPEVTCVVVDVSHEDPEVKFNWYVDGVEVHNAKTKPREEQYNSTYRV
VSVLTVLHQDWLNGKEYKCKVSNKALPAPIEKTISKAKGQPREPQVYTLPPSRDELTKNQVS
LTCLVKGFYPSDIAVEWESNGQPENNYKTTPPVLDSDGSFFLYSKLTVDKSRWQQGNVFSCS
VMHEALHNHYTQKSLSLSPGKELQLEESCAEAQDGELDGGSDIQMTQSPSSLSASVGDRVTI
TCRASRPISDWLHWYQQKPGKAPKLLIAWASTLDSGVPSRFSGSGSGTDFTLTISSLQPEDF
ATYYCLQEGWGPPTFGQGTKVEIKR
Sequence ID number 37 = 586H-ELQLE-147 (H chain)
QVQLVQSGAEVKKPGSSVKVSCKASGFYIKDTYMHWVRQAPGQGLEWMGTIDPANGNTKYVP
KFQGRVTITADESTSTAYMELSSLRSEDTAVYYCARSIYDDYHYDDYYAMDYWGQGTLVTVS
SASTKGPSVFPLAPSSKSTSGGTAALGCLVKDYFPEPVTVSWNSGALTSGVHTFPAVLQSSG
LYSLSSVVTVPSSSLGTQTYICNVNHKPSNTKVDKKVEPKSCDKTHTCPPCPAPELLGGPSV
FLFPPKPKDTLMISRTPEVTCVVVDVSHEDPEVKFNWYVDGVEVHNAKTKPREEQYNSTYRV
VSVLTVLHQDWLNGKEYKCKVSNKALPAPIEKTISKAKGQPREPQVYTLPPSRDELTKNQVS
LTCLVKGFYPSDIAVEWESNGQPENNYKTTPPVLDSDGSFFLYSKLTVDKSRWQQGNVFSCS
VMHEALHNHYTQKSLSLSPGKGSELQLEESCAEAQDGELDGGSDIQMTQSPSSLSASVGDRV
TITCRASRPISDWLHWYQQKPGKAPKLLIAWASSLYEGVPSRFSGSGSGTDFTLTISSLQPE
DFATYYCLQEGWGPPTFGQGTKVEIKR
Sequence ID number 38 = 586H-ELQLE-154 (H chain)
QVQLVQSGAEVKKPGSSVKVSCKASGFYIKDTYMHWVRQAPGQGLEWMGTIDPANGNTKYVP
KFQGRVTITADESTSTAYMELSSLRSEDTAVYYCARSIYDDYHYDDYYAMDYWGQGTLVTVS
SASTKGPSVFPLAPSSKSTSGGTAALGCLVKDYFPEPVTVSWNSGALTSGVHTFPAVLQSSG
LYSLSSVVTVPSSSLGTQTYICNVNHKPSNTKVDKKVEPKSCDKTHTCPPCPAPELLGGPSV
FLFPPKPKDTLMISRTPEVTCVVVDVSHEDPEVKFNWYVDGVEVHNAKTKPREEQYNSTYRV
VSVLTVLHQDWLNGKEYKCKVSNKALPAPIEKTISKAKGQPREPQVYTLPPSRDELTKNQVS
LTCLVKGFYPSDIAVEWESNGQPENNYKTTPPVLDSDGSFFLYSKLTVDKSRWQQGNVFSCS
VMHEALHNHYTQKSLSLSPGKGSELQLEESCAEAQDGELDGGSDIQMTQSPSSLSASVGDRV
TITCRASRPISDWLHWYQQKPGKAPKLLIAWASSLQGGVPSRFSGSGSGTDFTLTISSLQPE
DFATYYCLQEGWGPPTFGQGTKVEIKR
Sequence ID number 39 = 586H-ELQLE-210 (H chain)
QVQLVQSGAEVKKPGSSVKVSCKASGFYIKDTYMHWVRQAPGQGLEWMGTIDPANGNTKYVP
KFQGRVTITADESTSTAYMELSSLRSEDTAVYYCARSIYDDYHYDDYYAMDYWGQGTLVTVS
SASTKGPSVFPLAPSSKSTSGGTAALGCLVKDYFPEPVTVSWNSGALTSGVHTFPAVLQSSG
LYSLSSVVTVPSSSLGTQTYICNVNHKPSNTKVDKKVEPKSCDKTHTCPPCPAPELLGGPSV
FLFPPKPKDTLMISRTPEVTCVVVDVSHEDPEVKFNWYVDGVEVHNAKTKPREEQYNSTYRV
VSVLTVLHQDWLNGKEYKCKVSNKALPAPIEKTISKAKGQPREPQVYTLPPSRDELTKNQVS
LTCLVKGFYPSDIAVEWESNGQPENNYKTTPPVLDSDGSFFLYSKLTVDKSRWQQGNVFSCS
VMHEALHNHYTQKSLSLSPGKGSELQLEESCAEAQDGELDGGSEVQLLESGGGLVQPGGSLR
LSCAASGFTFRNFGMGWVRQAPGKGLEWVSWIISSGTETYYADSVKGRFTISRDNSKNTLYL
QMNSLRAEDTAVYYCAKSLGRFDYWGQGTLVTVSS
Sequence ID number 40 = 586H (H chain)
QVQLVQSGAEVKKPGSSVKVSCKASGFYIKDTYMHWVRQAPGQGLEWMGTIDPANGNTKYVP
KFQGRVTITADESTSTAYMELSSLRSEDTAVYYCARSIYDDYHYDDYYAMDYWGQGTLVTVS
SASTKGPSVFPLAPSSKSTSGGTAALGCLVKDYFPEPVTVSWNSGALTSGVHTFPAVLQSSG
LYSLSSVVTVPSSSLGTQTYICNVNHKPSNTKVDKKVEPKSCDKTHTCPPCPAPELLGGPSV
FLFPPKPKDTLMISRTPEVTCVVVDVSHEDPEVKFNWYVDGVEVHNAKTKPREEQYNSTYRV
VSVLTVLHQDWLNGKEYKCKVSNKALPAPIEKTISKAKGQPREPQVYTLPPSRDELTKNQVS
LTCLVKGFYPSDIAVEWESNGQPENNYKTTPPVLDSDGSFFLYSKLTVDKSRWQQGNVFSCS
VMHEALHNHYTQKSLSLSPGKGS
Sequence ID number 41 = 586H-ASTKG (H chain)
QVQLVQSGAEVKKPGSSVKVSCKASGFYIKDTYMHWVRQAPGQGLEWMGTIDPANGNTKYVP
KFQGRVTITADESTSTAYMELSSLRSEDTAVYYCARSIYDDYHYDDYYAMDYWGQGTLVTVS
SASTKGPSVFPLAPSSKSTSGGTAALGCLVKDYFPEPVTVSWNSGALTSGVHTFPAVLQSSG
LYSLSSVVTVPSSSLGTQTYICNVNHKPSNTKVDKKVEPKSCDKTHTCPPCPAPELLGGPSV
FLFPPKPKDTLMISRTPEVTCVVVDVSHEDPEVKFNWYVDGVEVHNAKTKPREEQYNSTYRV
VSVLTVLHQDWLNGKEYKCKVSNKALPAPIEKTISKAKGQPREPQVYTLPPSRDELTKNQVS
LTCLVKGFYPSDIAVEWESNGQPENNYKTTPPVLDSDGSFFLYSKLTVDKSRWQQGNVFSCS
VMHEALHNHYTQKSLSLSPGKGSASTKGPTGS
Sequence ID number 42 = 586H-EPKSC (H chain)
QVQLVQSGAEVKKPGSSVKVSCKASGFYIKDTYMHWVRQAPGQGLEWMGTIDPANGNTKYVP
KFQGRVTITADESTSTAYMELSSLRSEDTAVYYCARSIYDDYHYDDYYAMDYWGQGTLVTVS
SASTKGPSVFPLAPSSKSTSGGTAALGCLVKDYFPEPVTVSWNSGALTSGVHTFPAVLQSSG
LYSLSSVVTVPSSSLGTQTYICNVNHKPSNTKVDKKVEPKSCDKTHTCPPCPAPELLGGPSV
FLFPPKPKDTLMISRTPEVTCVVVDVSHEDPEVKFNWYVDGVEVHNAKTKPREEQYNSTYRV
VSVLTVLHQDWLNGKEYKCKVSNKALPAPIEKTISKAKGQPREPQVYTLPPSRDELTKNQVS
LTCLVKGFYPSDIAVEWESNGQPENNYKTTPPVLDSDGSFFLYSKLTVDKSRWQQGNVFSCS
VMHEALHNHYTQKSLSLSPGKGSEPKSCDKTHTCPPCPGS
Sequence ID number 43 = 586H-ELQLE (H chain)
QVQLVQSGAEVKKPGSSVKVSCKASGFYIKDTYMHWVRQAPGQGLEWMGTIDPANGNTKYVP
KFQGRVTITADESTSTAYMELSSLRSEDTAVYYCARSIYDDYHYDDYYAMDYWGQGTLVTVS
SASTKGPSVFPLAPSSKSTSGGTAALGCLVKDYFPEPVTVSWNSGALTSGVHTFPAVLQSSG
LYSLSSVVTVPSSSLGTQTYICNVNHKPSNTKVDKKVEPKSCDKTHTCPPCPAPELLGGPSV
FLFPPKPKDTLMISRTPEVTCVVVDVSHEDPEVKFNWYVDGVEVHNAKTKPREEQYNSTYRV
VSVLTVLHQDWLNGKEYKCKVSNKALPAPIEKTISKAKGQPREPQVYTLPPSRDELTKNQVS
LTCLVKGFYPSDIAVEWESNGQPENNYKTTPPVLDSDGSFFLYSKLTVDKSRWQQGNVFSCS
VMHEALHNHYTQKSLSLSPGKGSELQLEESCAEAQDGELDGGS
Sequence ID number 44 = 586L-G4S-25 (L chain)
DIVMTQSPLSLPVTPGEPASISCRSSQNIVHINGNTYLEWYLQKPGQSPRLLIYKISDRFSG
VPDRFSGSGSGTDFTLKISRVEADDVGIYYCFQGSHVPWTFGQGTKLEIKRTVAAPSVFIFP
PSDEQLKSGTASVVCLLNNFYPREAKVQWKVDNALQSGNSQESVTEQDSKDSTYSLSSTLTL
SKADYEKHKVYACEVTHQGLSSPVTKSFNRGECGGGGSDIQMTQSPSSLSASVGDRVTITCR
ASRPISDWLHWYQQKPGKAPKLLIAWASTLDSGVPSRFSGSGSGTDFTLTISSLQPEDFATY
YCLQEGWGPPTFGQGTKVEIKR
Sequence ID number 45 = 586L-G4S-147 (L chain)
DIVMTQSPLSLPVTPGEPASISCRSSQNIVHINGNTYLEWYLQKPGQSPRLLIYKISDRFSG
VPDRFSGSGSGTDFTLKISRVEADDVGIYYCFQGSHVPWTFGQGTKLEIKRTVAAPSVFIFP
PSDEQLKSGTASVVCLLNNFYPREAKVQWKVDNALQSGNSQESVTEQDSKDSTYSLSSTLTL
SKADYEKHKVYACEVTHQGLSSPVTKSFNRGECGGGGSDIQMTQSPSSLSASVGDRVTITCR
ASRPISDWLHWYQQKPGKAPKLLIAWASSLYEGVPSRFSGSGSGTDFTLTISSLQPEDFATY
YCLQEGWGPPTFGQGTKVEIKR
Sequence ID number 46 = 586L-G4S-154 (L chain)
DIVMTQSPLSLPVTPGEPASISCRSSQNIVHINGNTYLEWYLQKPGQSPRLLIYKISDRFSG
VPDRFSGSGSGTDFTLKISRVEADDVGIYYCFQGSHVPWTFGQGTKLEIKRTVAAPSVFIFP
PSDEQLKSGTASVVCLLNNFYPREAKVQWKVDNALQSGNSQESVTEQDSKDSTYSLSSTLTL
SKADYEKHKVYACEVTHQGLSSPVTKSFNRGECGGGGSDIQMTQSPSSLSASVGDRVTITCR
ASRPISDWLHWYQQKPGKAPKLLIAWASSLQGGVPSRFSGSGSGTDFTLTISSLQPEDFATY
YCLQEGWGPPTFGQGTKVEIKR
Sequence ID number 47 = 586L-G4S-210 (L chain)
DIVMTQSPLSLPVTPGEPASISCRSSQNIVHINGNTYLEWYLQKPGQSPRLLIYKISDRFSG
VPDRFSGSGSGTDFTLKISRVEADDVGIYYCFQGSHVPWTFGQGTKLEIKRTVAAPSVFIFP
PSDEQLKSGTASVVCLLNNFYPREAKVQWKVDNALQSGNSQESVTEQDSKDSTYSLSSTLTL
SKADYEKHKVYACEVTHQGLSSPVTKSFNRGECGGGGSEVQLLESGGGLVQPGGSLRLSCAA
SGFTFRNFGMGWVRQAPGKGLEWVSWIISSGTETYYADSVKGRFTISRDNSKNTLYLQMNSL
RAEDTAVYYCAKSLGRFDYWGQGTLVTVSS
Sequence ID number 48 = PascoH-474 (H chain)
QVTLRESGPALVKPTQTLTLTCTFSGFSLSTSGMGVSWIRQPPGKGLEWLAHIYWDDDKRYN
PSLKSRLTISKDTSRNQVVLTMTNMDPVDTATYYCARRETVFYWYFDVWGRGTLVTVSSAST
KGPSVFPLAPSSKSTSGGTAALGCLVKDYFPEPVTVSWNSGALTSGVHTFPAVLQSSGLYSL
SSVVTVPSSSLGTQTYICNVNHKPSNTKVDKKVEPKSCDKTHTCPPCPAPELLGGPSVFLFP
PKPKDTLMISRTPEVTCVVVDVSHEDPEVKFNWYVDGVEVHNAKTKPREEQYNSTYRVVSVL
TVLHQDWLNGKEYKCKVSNKALPAPIEKTISKAKGQPREPQVYTLPPSRDELTKNQVSLTCL
VKGFYPSDIAVEWESNGQPENNYKTTPPVLDSDGSFFLYSKLTVDKSRWQQGNVFSCSVMHE
ALHNHYTQKSLSLSPGKGSGVQLLESGGGLVQPGGSLRLSCAASGFTFAWYDMGWVRQAPGK
GLEWVSSIDWHGEVTYYADSVKGRFTISRDNSKNTLYLQMNSLRAEDTAVYYCATAEDEPGY
DYWGQGTLVTVSS
Sequence ID number 49 = PascoH-G4S-474 (H chain)
QVTLRESGPALVKPTQTLTLTCTFSGFSLSTSGMGVSWIRQPPGKGLEWLAHIYWDDDKRYN
PSLKSRLTISKDTSRNQVVLTMTNMDPVDTATYYCARRETVFYWYFDVWGRGTLVTVSSAST
KGPSVFPLAPSSKSTSGGTAALGCLVKDYFPEPVTVSWNSGALTSGVHTFPAVLQSSGLYSL
SSVVTVPSSSLGTQTYICNVNHKPSNTKVDKKVEPKSCDKTHTCPPCPAPELLGGPSVFLFP
PKPKDTLMISRTPEVTCVVVDVSHEDPEVKFNWYVDGVEVHNAKTKPREEQYNSTYRVVSVL
TVLHQDWLNGKEYKCKVSNKALPAPIEKTISKAKGQPREPQVYTLPPSRDELTKNQVSLTCL
VKGFYPSDIAVEWESNGQPENNYKTTPPVLDSDGSFFLYSKLTVDKSRWQQGNVFSCSVMHE
ALHNHYTQKSLSLSPGKGGGGSGVQLLESGGGLVQPGGSLRLSCAASGFTFAWYDMGWVRQA
PGKGLEWVSSIDWHGEVTYYADSVKGRFTISRDNSKNTLYLQMNSLRAEDTAVYYCATAEDE
PGYDYWGQGTLVTVSS
Sequence ID number 50 = PascoH-TVAAPS-474 (H chain)
QVTLRESGPALVKPTQTLTLTCTFSGFSLSTSGMGVSWIRQPPGKGLEWLAHIYWDDDKRYN
PSLKSRLTISKDTSRNQVVLTMTNMDPVDTATYYCARRETVFYWYFDVWGRGTLVTVSSAST
KGPSVFPLAPSSKSTSGGTAALGCLVKDYFPEPVTVSWNSGALTSGVHTFPAVLQSSGLYSL
SSVVTVPSSSLGTQTYICNVNHKPSNTKVDKKVEPKSCDKTHTCPPCPAPELLGGPSVFLFP
PKPKDTLMISRTPEVTCVVVDVSHEDPEVKFNWYVDGVEVHNAKTKPREEQYNSTYRVVSVL
TVLHQDWLNGKEYKCKVSNKALPAPIEKTISKAKGQPREPQVYTLPPSRDELTKNQVSLTCL
VKGFYPSDIAVEWESNGQPENNYKTTPPVLDSDGSFFLYSKLTVDKSRWQQGNVFSCSVMHE
ALHNHYTQKSLSLSPGKTVAAPSGSGVQLLESGGGLVQPGGSLRLSCAASGFTFAWYDMGWV
RQAPGKGLEWVSSIDWHGEVTYYADSVKGRFTISRDNSKNTLYLQMNSLRAEDTAVYYCATA
EDEPGYDYWGQGTLVTVSS
Sequence ID number 51 = PascoH-ASTKG-474 (H chain)
QVTLRESGPALVKPTQTLTLTCTFSGFSLSTSGMGVSWIRQPPGKGLEWLAHIYWDDDKRYN
PSLKSRLTISKDTSRNQVVLTMTNMDPVDTATYYCARRETVFYWYFDVWGRGTLVTVSSAST
KGPSVFPLAPSSKSTSGGTAALGCLVKDYFPEPVTVSWNSGALTSGVHTFPAVLQSSGLYSL
SSVVTVPSSSLGTQTYICNVNHKPSNTKVDKKVEPKSCDKTHTCPPCPAPELLGGPSVFLFP
PKPKDTLMISRTPEVTCVVVDVSHEDPEVKFNWYVDGVEVHNAKTKPREEQYNSTYRVVSVL
TVLHQDWLNGKEYKCKVSNKALPAPIEKTISKAKGQPREPQVYTLPPSRDELTKNQVSLTCL
VKGFYPSDIAVEWESNGQPENNYKTTPPVLDSDGSFFLYSKLTVDKSRWQQGNVFSCSVMHE
ALHNHYTQKSLSLSPGKGSASTKGPTGSGVQLLESGGGLVQPGGSLRLSCAASGFTFAWYDM
GWVRQAPGKGLEWVSSIDWHGEVTYYADSVKGRFTISRDNSKNTLYLQMNSLRAEDTAVYYC
ATAEDEPGYDYWGQGTLVTVSS
Sequence ID number 52 = PascoH-EPKSC-474 (H chain)
QVTLRESGPALVKPTQTLTLTCTFSGFSLSTSGMGVSWIRQPPGKGLEWLAHIYWDDDKRYN
PSLKSRLTISKDTSRNQVVLTMTNMDPVDTATYYCARRETVFYWYFDVWGRGTLVTVSSAST
KGPSVFPLAPSSKSTSGGTAALGCLVKDYFPEPVTVSWNSGALTSGVHTFPAVLQSSGLYSL
SSVVTVPSSSLGTQTYICNVNHKPSNTKVDKKVEPKSCDKTHTCPPCPAPELLGGPSVFLFP
PKPKDTLMISRTPEVTCVVVDVSHEDPEVKFNWYVDGVEVHNAKTKPREEQYNSTYRVVSVL
TVLHQDWLNGKEYKCKVSNKALPAPIEKTISKAKGQPREPQVYTLPPSRDELTKNQVSLTCL
VKGFYPSDIAVEWESNGQPENNYKTTPPVLDSDGSFFLYSKLTVDKSRWQQGNVFSCSVMHE
ALHNHYTQKSLSLSPGKGSEPKSCDKTHTCPPCPGSGVQLLESGGGLVQPGGSLRLSCAASG
FTFAWYDMGWVRQAPGKGLEWVSSIDWHGEVTYYADSVKGRFTISRDNSKNTLYLQMNSLRA
EDTAVYYCATAEDEPGYDYWGQGTLVTVSS
Sequence ID number 53 = PascoH-ELQLE-474 (H chain)
QVTLRESGPALVKPTQTLTLTCTFSGFSLSTSGMGVSWIRQPPGKGLEWLAHIYWDDDKRYN
PSLKSRLTISKDTSRNQVVLTMTNMDPVDTATYYCARRETVFYWYFDVWGRGTLVTVSSAST
KGPSVFPLAPSSKSTSGGTAALGCLVKDYFPEPVTVSWNSGALTSGVHTFPAVLQSSGLYSL
SSVVTVPSSSLGTQTYICNVNHKPSNTKVDKKVEPKSCDKTHTCPPCPAPELLGGPSVFLFP
PKPKDTLMISRTPEVTCVVVDVSHEDPEVKFNWYVDGVEVHNAKTKPREEQYNSTYRVVSVL
TVLHQDWLNGKEYKCKVSNKALPAPIEKTISKAKGQPREPQVYTLPPSRDELTKNQVSLTCL
VKGFYPSDIAVEWESNGQPENNYKTTPPVLDSDGSFFLYSKLTVDKSRWQQGNVFSCSVMHE
ALHNHYTQKSLSLSPGKGSELQLEESCAEAQDGELDGGSGVQLLESGGGLVQPGGSLRLSCA
ASGFTFAWYDMGWVRQAPGKGLEWVSSIDWHGEVTYYADSVKGRFTISRDNSKNTLYLQMNS
LRAEDTAVYYCATAEDEPGYDYWGQGTLVTVSS
Sequence ID number 54 = PascoL-474 (L chain)
DIVLTQSPSSLSASVGDRVTITCKASQSVDYDGDSYMNWYQQKPGKAPKLLIYAASNLESGI
PSRFSGSGSGTDFTFTISSLQPEDIATYYCQQSNEDPPTFGQGTKVEIKRTVAAPSVFIFPP
SDEQLKSGTASVVCLLNNFYPREAKVQWKVDNALQSGNSQESVTEQDSKDSTYSLSSTLTLS
KADYEKHKVYACEVTHQGLSSPVTKSFNRGECGSGVQLLESGGGLVQPGGSLRLSCAASGFT
FAWYDMGWVRQAPGKGLEWVSSIDWHGEVTYYADSVKGRFTISRDNSKNTLYLQMNSLRAED
TAVYYCATAEDEPGYDYWGQGTLVTVSS
Sequence ID number 55 = PascoL-G4S-474 (L chain)
DIVLTQSPSSLSASVGDRVTITCKASQSVDYDGDSYMNWYQQKPGKAPKLLIYAASNLESGI
PSRFSGSGSGTDFTFTISSLQPEDIATYYCQQSNEDPPTFGQGTKVEIKRTVAAPSVFIFPP
SDEQLKSGTASVVCLLNNFYPREAKVQWKVDNALQSGNSQESVTEQDSKDSTYSLSSTLTLS
KADYEKHKVYACEVTHQGLSSPVTKSFNRGECGGGGSGVQLLESGGGLVQPGGSLRLSCAAS
GFTFAWYDMGWVRQAPGKGLEWVSSIDWHGEVTYYADSVKGRFTISRDNSKNTLYLQMNSLR
AEDTAVYYCATAEDEPGYDYWGQGTLVTVSS
Sequence ID number 56 = PascoL-TVAAPS-474 (L chain)
DIVLTQSPSSLSASVGDRVTITCKASQSVDYDGDSYMNWYQQKPGKAPKLLIYAASNLESGI
PSRFSGSGSGTDFTFTISSLQPEDIATYYCQQSNEDPPTFGQGTKVEIKRTVAAPSVFIFPP
SDEQLKSGTASVVCLLNNFYPREAKVQWKVDNALQSGNSQESVTEQDSKDSTYSLSSTLTLS
KADYEKHKVYACEVTHQGLSSPVTKSFNRGECTVAAPSGSGVQLLESGGGLVQPGGSLRLSC
AASGFTFAWYDMGWVRQAPGKGLEWVSSIDWHGEVTYYADSVKGRFTISRDNSKNTLYLQMN
SLRAEDTAVYYCATAEDEPGYDYWGQGTLVTVSS
Sequence ID number 57 = PascoL-ASTKG-474 (L chain)
DIVLTQSPSSLSASVGDRVTITCKASQSVDYDGDSYMNWYQQKPGKAPKLLIYAASNLESGI
PSRFSGSGSGTDFTFTISSLQPEDIATYYCQQSNEDPPTFGQGTKVEIKRTVAAPSVFIFPP
SDEQLKSGTASVVCLLNNFYPREAKVQWKVDNALQSGNSQESVTEQDSKDSTYSLSSTLTLS
KADYEKHKVYACEVTHQGLSSPVTKSFNRGECASTKGPTGSGVQLLESGGGLVQPGGSLRLS
CAASGFTFAWYDMGWVRQAPGKGLEWVSSIDWHGEVTYYADSVKGRFTISRDNSKNTLYLQM
NSLRAEDTAVYYCATAEDEPGYDYWGQGTLVTVSS
Sequence ID number 58 = PascoL-EPKSC-474 (L chain)
DIVLTQSPSSLSASVGDRVTITCKASQSVDYDGDSYMNWYQQKPGKAPKLLIYAASNLESGI
PSRFSGSGSGTDFTFTISSLQPEDIATYYCQQSNEDPPTFGQGTKVEIKRTVAAPSVFIFPP
SDEQLKSGTASVVCLLNNFYPREAKVQWKVDNALQSGNSQESVTEQDSKDSTYSLSSTLTLS
KADYEKHKVYACEVTHQGLSSPVTKSFNRGECEPKSCDKTHTCPPCPGSGVQLLESGGGLVQ
PGGSLRLSCAASGFTFAWYDMGWVRQAPGKGLEWVSSIDWHGEVTYYADSVKGRFTISRDNS
KNTLYLQMNSLRAEDTAVYYCATAEDEPGYDYWGQGTLVTVSS
Sequence ID number 59 = PascoL-ELQLE-474 (L chain)
DIVLTQSPSSLSASVGDRVTITCKASQSVDYDGDSYMNWYQQKPGKAPKLLIYAASNLESGI
PSRFSGSGSGTDFTFTISSLQPEDIATYYCQQSNEDPPTFGQGTKVEIKRTVAAPSVFIFPP
SDEQLKSGTASVVCLLNNFYPREAKVQWKVDNALQSGNSQESVTEQDSKDSTYSLSSTLTLS
KADYEKHKVYACEVTHQGLSSPVTKSFNRGECELQLEESCAEAQDGELDGGSGVQLLESGGG
LVQPGGSLRLSCAASGFTFAWYDMGWVRQAPGKGLEWVSSIDWHGEVTYYADSVKGRFTISR
DNSKNTLYLQMNSLRAEDTAVYYCATAEDEPGYDYWGQGTLVTVSS
SEQ ID NO: 60 = DNA sequence of DOM9-155-147
(protein = SEQ ID NO: 2)
GACATCCAGATGACCCAATCACCATCCTCCCTGTCTGCATCTGTAGGAGACCGTGTCACCAT
CACTtGCCGGGCAAGTCGCCCCATtAGCGACTGGTTACATtGGTATCAGCAGAAACCAGGGA
AAGCCCCCAAGCTCCTGATCGCCTGGGCGtCCTCGTTGTACGAGGGGGtCCCATCACGtTTC
AGTGGCAGTGGGTCGGGGACAGATTTCACTCTCACCATCAGCAGTCTGCAACCCGAAGATTT
CGCTACGTACTACTGTTTGCAGGAGGGGTGGGGTCCTCCGACGTTCGGCCAAGGGACCAAGG
TGGAAATCAAACGG
SEQ ID NO: 61 = DNA sequence of DOM9-155-154
(protein = SEQ ID NO: 3)
GACATCCAGATGACCCAATCACCATCCTCCCTGTCTGCATCTGTAGGAGACCGTGTCACCAT
CACTTGCCGGGCAAGTCGCCCCATTAGCGACTGGTTACATTGGTATCAGCAGAAACCAGGGA
AAGCCCCCAAGCTCCTGATCGCCTGGGCGTCCAGCTTGCAGGGGGGGGTCCCATCACGTTTC
AGTGGCAGTGGGTCGGGGACAGATTTCACTCTCACCATCAGCAGTCTGCAACCCGAAGATTT
CGCTACGTACTACTGTTTGCAGGAGGGGTGGGGTCCTCCGACGTTCGGCCAAGGGACCAAGG
TGGAAATCAAACGG
5. Cytokines
Sequence ID number 62 = IL-4 (Interleukin-4)
HKCDITLQEIIKTLNSLTEQKTLCTELTVTDIFAASKNTTEKETFCRAATVLRQFYSHHEKD
TRCLGATAQQFHRHKQLIRFLKRLDRNLWGLAGLNSCPVKEANQSTLENFLERLKTIMREKY
SKCSS
Sequence ID number 63 = IL-13 (Interleukin-13)
GPVPPSTALRELIEELVNITQNQKAPLCNGSMVWSINLTAGMYCAALESLINVSGCSAIEKT
QRMLSGFCPHKVSAGQFSSLHVRDTKIEVAQFVKDLLLHLKKLFREGRFN
6. Signal sequence
Sequence ID number 64 = human amino acid signal sequence
MGWSCIILFLVATATGVHS
7. Trispecific mAb-dAbs
Sequence ID number 69 = IL18mAb-210-474 (H chain)
QVQLVQSGAEVKKPGASVKVSCKVSGEISTGYYFHWVRQAPGKGLEWMGRIDPEDDSTKYAE
RFKDRVTMTEDTSTDTAYMELSSLRSEDTAVYYCTTWRIYRDSSGRPFYVMDAWGQGTLVTV
SSASTKGPSVFPLAPSSKSTSGGTAALGCLVKDYFPEPVTVSWNSGALTSGVHTFPAVLQSS
GLYSLSSVVTVPSSSLGTQTYICNVNHKPSNTKVDKKVEPKSCDKTHTCPPCPAPELLGGPS
VFLFPPKPKDTLMISRTPEVTCVVVDVSHEDPEVKFNWYVDGVEVHNAKTKPREEQYNSTYR
VVSVLTVLHQDWLNGKEYKCKVSNKALPAPIEKTISKAKGQPREPQVYTLPPSRDELTKNQV
SLTCLVKGFYPSDIAVEWESNGQPENNYKTTPPVLDSDGSFFLYSKLTVDKSRWQQGNVFSC
SVMHEALHNHYTQKSLSLSPGKGGGGSEVQLLESGGGLVQPGGSLRLSCAASGFTFRNFGMG
WVRQAPGKGLEWVSWIISSGTETYYADSVKGRFTISRDNSKNTLYLQMNSLRAEDTAVYYCA
KSLGRFDYWGQGTLVTVSS
Sequence ID number 70 = IL18mAb-210-474 (L chain)
DIQMTQSPSSVSASVGDRVTITCLASEDIYTYLTWYQQKPGKAPKLLIYGANKLQDGVPSRF
SGSGSGTDYTLTISSLQPEDFATYYCLQGSKFPLTFGQGTKLEIKRTVAAPSVFIFPPSDEQ
LKSGTASVVCLLNNFYPREAKVQWKVDNALQSGNSQESVTEQDSKDSTYSLSSTLTLSKADY
EKHKVYACEVTHQGLSSPVTKSFNRGECGGGGSGVQLLESGGGLVQPGGSLRLSCAASGFTF
AWYDMGWVRQAPGKGLEWVSSIDWHGEVTYYADSVKGRFTISRDNSKNTLYLQMNSLRAEDT
AVYYCATAEDEPGYDYWGQGTLVTVSS
Sequence ID number 71 = Mepo-210-474 (H chain)
QVTLRESGPALVKPTQTLTLTCTVSGFSLTSYSVHWVRQPPGKGLEWLGVIWASGGTDYNSA
LMSRLSISKDTSRNQVVLTMTNMDPVDTATYYCARDPPSSLLRLDYWGRGTLVTVSSASTKG
PSVFPLAPSSKSTSGGTAALGCLVKDYFPEPVTVSWNSGALTSGVHTFPAVLQSSGLYSLSS
VVTVPSSSLGTQTYICNVNHKPSNTKVDKKVEPKSCDKTHTCPPCPAPELLGGPSVFLFPPK
PKDTLMISRTPEVTCVVVDVSHEDPEVKFNWYVDGVEVHNAKTKPREEQYNSTYRVVSVLTV
LHQDWLNGKEYKCKVSNKALPAPIEKTISKAKGQPREPQVYTLPPSRDELTKNQVSLTCLVK
GFYPSDIAVEWESNGQPENNYKTTPPVLDSDGSFFLYSKLTVDKSRWQQGNVFSCSVMHEAL
HNHYTQKSLSLSPGKGGGGSEVQLLESGGGLVQPGGSLRLSCAASGFTFRNFGMGWVRQAPG
KGLEWVSWIISSGTETYYADSVKGRFTISRDNSKNTLYLQMNSLRAEDTAVYYCAKSLGRFD
YWGQGTLVTVSS
Sequence ID number 72 = Mepo-210-474 (L chain)
DIVMTQSPDSLAVSLGERATINCKSSQSLLNSGNQKNYLAWYQQKPGQPPKLLIYGASTRES
GVPDRFSGSGSGTDFTLTISSLQAEDVAVYYCQNVHSFPFTFGGGTKLEIKRTVAAPSVFIF
PPSDEQLKSGTASVVCLLNNFYPREAKVQWKVDNALQSGNSQESVTEQDSKDSTYSLSSTLT
LSKADYEKHKVYACEVTHQGLSSPVTKSFNRGECGGGGSGVQLLESGGGLVQPGGSLRLSCA
ASGFTFAWYDMGWVRQAPGKGLEWVSSIDWHGEVTYYADSVKGRFTISRDNSKNTLYLQMNS
LRAEDTAVYYCATAEDEPGYDYWGQGTLVTVSS

1.-30. (canceled)

31. An antigen-binding construct comprising a protein scaffold which is an antibody immunoglobulin scaffold comprising at least two heavy chains and two light chains, which scaffold is linked to one or more epitope-binding domains wherein the antigen-binding construct has four antigen binding sites, two of which are from epitope binding domains which are immunoglobulin single variable domains, and two of which are from paired VH/VL domains, wherein the antigen binding construct is capable of binding IL-13, wherein at least one of the immunoglobulin single variable domains is directly attached to the scaffold with a linker comprising from 1 to 50 amino acids and wherein the immunoglobulin single variable domains are attached to the immunoglobulin scaffold at the C-terminus of the heavy chain.

32. An antigen-binding construct according to claim 31, wherein the binding construct has specificity for more than one antigen.

33. An antigen-binding construct according to claim 31 wherein the antigen-binding construct is also capable of binding one or more antigens selected from IL-4 and IL-5.

34. An antigen-binding construct according to claim 31 wherein the Immunoglobulin scaffold is an IgG scaffold.

35. An antigen-binding construct according to claim 34 wherein the IgG scaffold comprises all the domains of an antibody.

36. An antigen-binding construct according to claim 1 wherein at least one of the immunoglobulin single variable domain is directly attached to the Immunoglobulin scaffold with a linker selected from any one of those set out in SEQ ID NO: 6 to 11 or ‘GS’, or any combination thereof.

37. An antigen-binding construct according to claim 36 wherein the linker comprises the sequence of SEQ ID NO: 7

38. An antigen binding construct according to claim 31 which comprises an IL-13 antibody and which further comprises an immunoglobulin single variable domain with specificity for IL-4.

39. An antigen binding construct according to claim 38 wherein the antigen binding construct comprises the light chain sequence of SEQ ID NO: 13.

40. An antigen binding construct according to claim 38 comprising a heavy chain and a light chain, wherein the heavy chain comprises the antibody sequence of SEQ ID NO:12, the linker sequence of SEQ ID NO:7 and the immunoglobulin single variable domain of SEQ ID NO:3.

41. An antigen binding construct according to claim 31 which comprises an IL-5 antibody and which further comprises an immunoglobulin single variable domain with specificity for IL-13.

42. An antigen binding construct according to claim 41 comprising a heavy chain and a light chain, wherein the heavy chain sequence comprises an antibody sequence which has at least 90% sequence identity to SEQ ID NO: 65 and wherein the light chain comprises an antibody sequence which has at least 90% sequence identity to SEQ ID NO: 66.

43. An antigen binding construct according to claim 42 comprising a heavy chain and a light chain, wherein the light chain sequence has at least 90% sequence identity to SEQ ID NO: 72.

44. An antigen binding construct according to claim 31 comprising a heavy chain and a light chain, wherein the heavy chain sequence has at least 90% sequence identity to SEQ ID NO: 26 and wherein the light chain sequence has at least 90% sequence identity to SEQ ID NO: 13.

45. A polynucleotide encoding a light chain or a heavy chain of an antigen binding construct according to claim 31.

46. A recombinant transformed or transfected host cell comprising one or more polynucleotide sequences encoding a heavy chain and a light chain of an antigen binding construct of claim 31.

47. A method for the production of an antigen binding construct comprising:
a) culturing the host cell of claim 46; and
b) isolating the antigen binding construct;
whereby the antigen binding construct is produced.

48. A pharmaceutical composition comprising an antigen binding construct of claim 31 and a pharmaceutically acceptable carrier.

49. An antigen-binding construct according to claim 31 for use in medicine.

50. An antigen-binding construct according to claim 31 for the treatment of inflammatory diseases such as asthma, rheumatoid arthritis or osteoarthritis.

The application's sequence listing, which the Patent Office published only in electronic form, follows.

SEQUENCE LISTING (295 sequences)

SEQ ID NO: 1 - protein, 108 aa, Homo Sapiens
DIQMTQSPSSLSASVGDRVTITCRASRPISDWLHWYQQKPGKAPKLLIAWASTLDSGVPSRFSGSGSGTDFTLTISSLQPEDFATYYCLQEGWGPPTFGQGTKVEIKR

SEQ ID NO: 2 - protein, 108 aa, Homo Sapiens
DIQMTQSPSSLSASVGDRVTITCRASRPISDWLHWYQQKPGKAPKLLIAWASSLYEGVPSRFSGSGSGTDFTLTISSLQPEDFATYYCLQEGWGPPTFGQGTKVEIKR

SEQ ID NO: 3 - protein, 108 aa, Homo Sapiens
DIQMTQSPSSLSASVGDRVTITCRASRPISDWLHWYQQKPGKAPKLLIAWASSLQGGVPSRFSGSGSGTDFTLTISSLQPEDFATYYCLQEGWGPPTFGQGTKVEIKR

SEQ ID NO: 4 - protein, 116 aa, Homo Sapiens
EVQLLESGGGLVQPGGSLRLSCAASGFTFRNFGMGWVRQAPGKGLEWVSWIISSGTETYYADSVKGRFTISRDNSKNTLYLQMNSLRAEDTAVYYCAKSLGRFDYWGQGTLVTVSS

SEQ ID NO: 5 - protein, 118 aa, Homo Sapiens
GVQLLESGGGLVQPGGSLRLSCAASGFTFAWYDMGWVRQAPGKGLEWVSSIDWHGEVTYYADSVKGRFTISRDNSKNTLYLQMNSLRAEDTAVYYCATAEDEPGYDYWGQGTLVTVSS

SEQ ID NO: 6 - protein, 5 aa, Artificial Sequence
  Linker
GGGGS

SEQ ID NO: 7 - protein, 6 aa, Artificial Sequence
  Linker
TVAAPS

SEQ ID NO: 8 - protein, 7 aa, Artificial Sequence
  Linker
ASTKGPT

SEQ ID NO: 9 - protein, 7 aa, Artificial Sequence
  Linker
ASTKGPS

SEQ ID NO: 10 - protein, 15 aa, Artificial Sequence
  Linker
EPKSCDKTHTCPPCP

SEQ ID NO: 11 - protein, 18 aa, Artificial Sequence
  Linker
ELQLEESCAEAQDGELDG

SEQ ID NO: 12 - protein, 455 aa, Artificial Sequence
  Humanised
QVQLVQSGAEVKKPGSSVKVSCKASGFYIKDTYMHWVRQAPGQGLEWMGTIDPANGNTKYVPKFQGRVTITADESTSTAYMELSSLRSEDTAVYYCARSIYDDYHYDDYYAMDYWGQGTLVTVSSASTKGPSVFPLAPSSKSTSGGTAALGCLVKDYFPEPVTVSWNSGALTSGVHTFPAVLQSSGLYSLSSVVTVPSSSLGTQTYICNVNHKPSNTKVDKKVEPKSCDKTHTCPPCPAPELLGGPSVFLFPPKPKDTLMISRTPEVTCVVVDVSHEDPEVKFNWYVDGVEVHNAKTKPREEQYNSTYRVVSVLTVLHQDWLNGKEYKCKVSNKALPAPIEKTISKAKGQPREPQVYTLPPSRDELTKNQVSLTCLVKGFYPSDIAVEWESNGQPENNYKTTPPVLDSDGSFFLYSKLTVDKSRWQQGNVFSCSVMHEALHNHYTQKSLSLSPGK

SEQ ID NO: 13 - protein, 219 aa, Artificial Sequence
  Humanised
DIVMTQSPLSLPVTPGEPASISCRSSQNIVHINGNTYLEWYLQKPGQSPRLLIYKISDRFSGVPDRFSGSGSGTDFTLKISRVEADDVGIYYCFQGSHVPWTFGQGTKLEIKRTVAAPSVFIFPPSDEQLKSGTASVVCLLNNFYPREAKVQWKVDNALQSGNSQESVTEQDSKDSTYSLSSTLTLSKADYEKHKVYACEVTHQGLSSPVTKSFNRGEC

SEQ ID NO: 14 - protein, 451 aa, Artificial Sequence
  Humanised
QVTLRESGPALVKPTQTLTLTCTFSGFSLSTSGMGVSWIRQPPGKGLEWLAHIYWDDDKRYNPSLKSRLTISKDTSRNQVVLTMTNMDPVDTATYYCARRETVFYWYFDVWGRGTLVTVSSASTKGPSVFPLAPSSKSTSGGTAALGCLVKDYFPEPVTVSWNSGALTSGVHTFPAVLQSSGLYSLSSVVTVPSSSLGTQTYICNVNHKPSNTKVDKKVEPKSCDKTHTCPPCPAPELLGGPSVFLFPPKPKDTLMISRTPEVTCVVVDVSHEDPEVKFNWYVDGVEVHNAKTKPREEQYNSTYRVVSVLTVLHQDWLNGKEYKCKVSNKALPAPIEKTISKAKGQPREPQVYTLPPSRDELTKNQVSLTCLVKGFYPSDIAVEWESNGQPENNYKTTPPVLDSDGSFFLYSKLTVDKSRWQQGNVFSCSVMHEALHNHYTQKSLSLSPGK

SEQ ID NO: 15 - protein, 218 aa, Artificial Sequence
  Humanised
DIVLTQSPSSLSASVGDRVTITCKASQSVDYDGDSYMNWYQQKPGKAPKLLIYAASNLESGIPSRFSGSGSGTDFTFTISSLQPEDIATYYCQQSNEDPPTFGQGTKVEIKRTVAAPSVFIFPPSDEQLKSGTASVVCLLNNFYPREAKVQWKVDNALQSGNSQESVTEQDSKDSTYSLSSTLTLSKADYEKHKVYACEVTHQGLSSPVTKSFNRGEC

SEQ ID NO: 16 - protein, 565 aa, Artificial Sequence
  Humanised
QVQLVQSGAEVKKPGSSVKVSCKASGFYIKDTYMHWVRQAPGQGLEWMGTIDPANGNTKYVPKFQGRVTITADESTSTAYMELSSLRSEDTAVYYCARSIYDDYHYDDYYAMDYWGQGTLVTVSSASTKGPSVFPLAPSSKSTSGGTAALGCLVKDYFPEPVTVSWNSGALTSGVHTFPAVLQSSGLYSLSSVVTVPSSSLGTQTYICNVNHKPSNTKVDKKVEPKSCDKTHTCPPCPAPELLGGPSVFLFPPKPKDTLMISRTPEVTCVVVDVSHEDPEVKFNWYVDGVEVHNAKTKPREEQYNSTYRVVSVLTVLHQDWLNGKEYKCKVSNKALPAPIEKTISKAKGQPREPQVYTLPPSRDELTKNQVSLTCLVKGFYPSDIAVEWESNGQPENNYKTTPPVLDSDGSFFLYSKLTVDKSRWQQGNVFSCSVMHEALHNHYTQKSLSLSPGKGSDIQMTQSPSSLSASVGDRVTITCRASRPISDWLHWYQQKPGKAPKLLIAWASTLDSGVPSRFSGSGSGTDFTLTISSLQPEDFATYYCLQEGWGPPTFGQGTKVEIKR

SEQ ID NO: 17 - protein, 565 aa, Artificial Sequence
  Humanised
QVQLVQSGAEVKKPGSSVKVSCKASGFYIKDTYMHWVRQAPGQGLEWMGTIDPANGNTKYVPKFQGRVTITADESTSTAYMELSSLRSEDTAVYYCARSIYDDYHYDDYYAMDYWGQGTLVTVSSASTKGPSVFPLAPSSKSTSGGTAALGCLVKDYFPEPVTVSWNSGALTSGVHTFPAVLQSSGLYSLSSVVTVPSSSLGTQTYICNVNHKPSNTKVDKKVEPKSCDKTHTCPPCPAPELLGGPSVFLFPPKPKDTLMISRTPEVTCVVVDVSHEDPEVKFNWYVDGVEVHNAKTKPREEQYNSTYRVVSVLTVLHQDWLNGKEYKCKVSNKALPAPIEKTISKAKGQPREPQVYTLPPSRDELTKNQVSLTCLVKGFYPSDIAVEWESNGQPENNYKTTPPVLDSDGSFFLYSKLTVDKSRWQQGNVFSCSVMHEALHNHYTQKSLSLSPGKGSDIQMTQSPSSLSASVGDRVTITCRASRPISDWLHWYQQKPGKAPKLLIAWASSLYEGVPSRFSGSGSGTDFTLTISSLQPEDFATYYCLQEGWGPPTFGQGTKVEIKR

SEQ ID NO: 18 - protein, 565 aa, Artificial Sequence
  Humanised
QVQLVQSGAEVKKPGSSVKVSCKASGFYIKDTYMHWVRQAPGQGLEWMGTIDPANGNTKYVPKFQGRVTITADESTSTAYMELSSLRSEDTAVYYCARSIYDDYHYDDYYAMDYWGQGTLVTVSSASTKGPSVFPLAPSSKSTSGGTAALGCLVKDYFPEPVTVSWNSGALTSGVHTFPAVLQSSGLYSLSSVVTVPSSSLGTQTYICNVNHKPSNTKVDKKVEPKSCDKTHTCPPCPAPELLGGPSVFLFPPKPKDTLMISRTPEVTCVVVDVSHEDPEVKFNWYVDGVEVHNAKTKPREEQYNSTYRVVSVLTVLHQDWLNGKEYKCKVSNKALPAPIEKTISKAKGQPREPQVYTLPPSRDELTKNQVSLTCLVKGFYPSDIAVEWESNGQPENNYKTTPPVLDSDGSFFLYSKLTVDKSRWQQGNVFSCSVMHEALHNHYTQKSLSLSPGKGSDIQMTQSPSSLSASVGDRVTITCRASRPISDWLHWYQQKPGKAPKLLIAWASSLQGGVPSRFSGSGSGTDFTLTISSLQPEDFATYYCLQEGWGPPTFGQGTKVEIKR

SEQ ID NO: 19 - protein, 573 aa, Artificial Sequence
  Humanised
QVQLVQSGAEVKKPGSSVKVSCKASGFYIKDTYMHWVRQAPGQGLEWMGTIDPANGNTKYVPKFQGRVTITADESTSTAYMELSSLRSEDTAVYYCARSIYDDYHYDDYYAMDYWGQGTLVTVSSASTKGPSVFPLAPSSKSTSGGTAALGCLVKDYFPEPVTVSWNSGALTSGVHTFPAVLQSSGLYSLSSVVTVPSSSLGTQTYICNVNHKPSNTKVDKKVEPKSCDKTHTCPPCPAPELLGGPSVFLFPPKPKDTLMISRTPEVTCVVVDVSHEDPEVKFNWYVDGVEVHNAKTKPREEQYNSTYRVVSVLTVLHQDWLNGKEYKCKVSNKALPAPIEKTISKAKGQPREPQVYTLPPSRDELTKNQVSLTCLVKGFYPSDIAVEWESNGQPENNYKTTPPVLDSDGSFFLYSKLTVDKSRWQQGNVFSCSVMHEALHNHYTQKSLSLSPGKGSEVQLLESGGGLVQPGGSLRLSCAASGFTFRNFGMGWVRQAPGKGLEWVSWIISSGTETYYADSVKGRFTISRDNSKNTLYLQMNSLRAEDTAVYYCAKSLGRFDYWGQGTLVTVSS

SEQ ID NO: 20 - protein, 568 aa, Artificial Sequence
  Humanised
QVQLVQSGAEVKKPGSSVKVSCKASGFYIKDTYMHWVRQAPGQGLEWMGTIDPANGNTKYVPKFQGRVTITADESTSTAYMELSSLRSEDTAVYYCARSIYDDYHYDDYYAMDYWGQGTLVTVSSASTKGPSVFPLAPSSKSTSGGTAALGCLVKDYFPEPVTVSWNSGALTSGVHTFPAVLQSSGLYSLSSVVTVPSSSLGTQTYICNVNHKPSNTKVDKKVEPKSCDKTHTCPPCPAPELLGGPSVFLFPPKPKDTLMISRTPEVTCVVVDVSHEDPEVKFNWYVDGVEVHNAKTKPREEQYNSTYRVVSVLTVLHQDWLNGKEYKCKVSNKALPAPIEKTISKAKGQPREPQVYTLPPSRDELTKNQVSLTCLVKGFYPSDIAVEWESNGQPENNYKTTPPVLDSDGSFFLYSKLTVDKSRWQQGNVFSCSVMHEALHNHYTQKSLSLSPGKGGGGSDIQMTQSPSSLSASVGDRVTITCRASRPISDWLHWYQQKPGKAPKLLIAWASTLDSGVPSRFSGSGSGTDFTLTISSLQPEDFATYYCLQEGWGPPTFGQGTKVEIKR

SEQ ID NO: 21 - protein, 568 aa, Artificial Sequence
  Humanised
QVQLVQSGAEVKKPGSSVKVSCKASGFYIKDTYMHWVRQAPGQGLEWMGTIDPANGNTKYVPKFQGRVTITADESTSTAYMELSSLRSEDTAVYYCARSIYDDYHYDDYYAMDYWGQGTLVTVSSASTKGPSVFPLAPSSKSTSGGTAALGCLVKDYFPEPVTVSWNSGALTSGVHTFPAVLQSSGLYSLSSVVTVPSSSLGTQTYICNVNHKPSNTKVDKKVEPKSCDKTHTCPPCPAPELLGGPSVFLFPPKPKDTLMISRTPEVTCVVVDVSHEDPEVKFNWYVDGVEVHNAKTKPREEQYNSTYRVVSVLTVLHQDWLNGKEYKCKVSNKALPAPIEKTISKAKGQPREPQVYTLPPSRDELTKNQVSLTCLVKGFYPSDIAVEWESNGQPENNYKTTPPVLDSDGSFFLYSKLTVDKSRWQQGNVFSCSVMHEALHNHYTQKSLSLSPGKGGGGSDIQMTQSPSSLSASVGDRVTITCRASRPISDWLHWYQQKPGKAPKLLIAWASSLYEGVPSRFSGSGSGTDFTLTISSLQPEDFATYYCLQEGWGPPTFGQGTKVEIKR

SEQ ID NO: 22 - protein, 568 aa, Artificial Sequence
  Humanised
QVQLVQSGAEVKKPGSSVKVSCKASGFYIKDTYMHWVRQAPGQGLEWMGTIDPANGNTKYVPKFQGRVTITADESTSTAYMELSSLRSEDTAVYYCARSIYDDYHYDDYYAMDYWGQGTLVTVSSASTKGPSVFPLAPSSKSTSGGTAALGCLVKDYFPEPVTVSWNSGALTSGVHTFPAVLQSSGLYSLSSVVTVPSSSLGTQTYICNVNHKPSNTKVDKKVEPKSCDKTHTCPPCPAPELLGGPSVFLFPPKPKDTLMISRTPEVTCVVVDVSHEDPEVKFNWYVDGVEVHNAKTKPREEQYNSTYRVVSVLTVLHQDWLNGKEYKCKVSNKALPAPIEKTISKAKGQPREPQVYTLPPSRDELTKNQVSLTCLVKGFYPSDIAVEWESNGQPENNYKTTPPVLDSDGSFFLYSKLTVDKSRWQQGNVFSCSVMHEALHNHYTQKSLSLSPGKGGGGSDIQMTQSPSSLSASVGDRVTITCRASRPISDWLHWYQQKPGKAPKLLIAWASSLQGGVPSRFSGSGSGTDFTLTISSLQPEDFATYYCLQEGWGPPTFGQGTKVEIKR

SEQ ID NO: 23 - protein, 576 aa, Artificial Sequence
  Humanised
QVQLVQSGAEVKKPGSSVKVSCKASGFYIKDTYMHWVRQAPGQGLEWMGTIDPANGNTKYVPKFQGRVTITADESTSTAYMELSSLRSEDTAVYYCARSIYDDYHYDDYYAMDYWGQGTLVTVSSASTKGPSVFPLAPSSKSTSGGTAALGCLVKDYFPEPVTVSWNSGALTSGVHTFPAVLQSSGLYSLSSVVTVPSSSLGTQTYICNVNHKPSNTKVDKKVEPKSCDKTHTCPPCPAPELLGGPSVFLFPPKPKDTLMISRTPEVTCVVVDVSHEDPEVKFNWYVDGVEVHNAKTKPREEQYNSTYRVVSVLTVLHQDWLNGKEYKCKVSNKALPAPIEKTISKAKGQPREPQVYTLPPSRDELTKNQVSLTCLVKGFYPSDIAVEWESNGQPENNYKTTPPVLDSDGSFFLYSKLTVDKSRWQQGNVFSCSVMHEALHNHYTQKSLSLSPGKGGGGSEVQLLESGGGLVQPGGSLRLSCAASGFTFRNFGMGWVRQAPGKGLEWVSWIISSGTETYYADSVKGRFTISRDNSKNTLYLQMNSLRAEDTAVYYCAKSLGRFDYWGQGTLVTVSS

SEQ ID NO: 24 - protein, 571 aa, Artificial Sequence
  Humanised
QVQLVQSGAEVKKPGSSVKVSCKASGFYIKDTYMHWVRQAPGQGLEWMGTIDPANGNTKYVPKFQGRVTITADESTSTAYMELSSLRSEDTAVYYCARSIYDDYHYDDYYAMDYWGQGTLVTVSSASTKGPSVFPLAPSSKSTSGGTAALGCLVKDYFPEPVTVSWNSGALTSGVHTFPAVLQSSGLYSLSSVVTVPSSSLGTQTYICNVNHKPSNTKVDKKVEPKSCDKTHTCPPCPAPELLGGPSVFLFPPKPKDTLMISRTPEVTCVVVDVSHEDPEVKFNWYVDGVEVHNAKTKPREEQYNSTYRVVSVLTVLHQDWLNGKEYKCKVSNKALPAPIEKTISKAKGQPREPQVYTLPPSRDELTKNQVSLTCLVKGFYPSDIAVEWESNGQPENNYKTTPPVLDSDGSFFLYSKLTVDKSRWQQGNVFSCSVMHEALHNHYTQKSLSLSPGKTVAAPSGSDIQMTQSPSSLSASVGDRVTITCRASRPISDWLHWYQQKPGKAPKLLIAWASTLDSGVPSRFSGSGSGTDFTLTISSLQPEDFATYYCLQEGWGPPTFGQGTKVEIKR

SEQ ID NO: 25 - protein, 571 aa, Artificial Sequence
  Humanised
QVQLVQSGAEVKKPGSSVKVSCKASGFYIKDTYMHWVRQAPGQGLEWMGTIDPANGNTKYVPKFQGRVTITADESTSTAYMELSSLRSEDTAVYYCARSIYDDYHYDDYYAMDYWGQGTLVTVSSASTKGPSVFPLAPSSKSTSGGTAALGCLVKDYFPEPVTVSWNSGALTSGVHTFPAVLQSSGLYSLSSVVTVPSSSLGTQTYICNVNHKPSNTKVDKKVEPKSCDKTHTCPPCPAPELLGGPSVFLFPPKPKDTLMISRTPEVTCVVVDVSHEDPEVKFNWYVDGVEVHNAKTKPREEQYNSTYRVVSVLTVLHQDWLNGKEYKCKVSNKALPAPIEKTISKAKGQPREPQVYTLPPSRDELTKNQVSLTCLVKGFYPSDIAVEWESNGQPENNYKTTPPVLDSDGSFFLYSKLTVDKSRWQQGNVFSCSVMHEALHNHYTQKSLSLSPGKTVAAPSGSDIQMTQSPSSLSASVGDRVTITCRASRPISDWLHWYQQKPGKAPKLLIAWASSLYEGVPSRFSGSGSGTDFTLTISSLQPEDFATYYCLQEGWGPPTFGQGTKVEIKR

SEQ ID NO: 26 - protein, 571 aa, Artificial Sequence
  Humanised
QVQLVQSGAEVKKPGSSVKVSCKASGFYIKDTYMHWVRQAPGQGLEWMGTIDPANGNTKYVPKFQGRVTITADESTSTAYMELSSLRSEDTAVYYCARSIYDDYHYDDYYAMDYWGQGTLVTVSSASTKGPSVFPLAPSSKSTSGGTAALGCLVKDYFPEPVTVSWNSGALTSGVHTFPAVLQSSGLYSLSSVVTVPSSSLGTQTYICNVNHKPSNTKVDKKVEPKSCDKTHTCPPCPAPELLGGPSVFLFPPKPKDTLMISRTPEVTCVVVDVSHEDPEVKFNWYVDGVEVHNAKTKPREEQYNSTYRVVSVLTVLHQDWLNGKEYKCKVSNKALPAPIEKTISKAKGQPREPQVYTLPPSRDELTKNQVSLTCLVKGFYPSDIAVEWESNGQPENNYKTTPPVLDSDGSFFLYSKLTVDKSRWQQGNVFSCSVMHEALHNHYTQKSLSLSPGKTVAAPSGSDIQMTQSPSSLSASVGDRVTITCRASRPISDWLHWYQQKPGKAPKLLIAWASSLQGGVPSRFSGSGSGTDFTLTISSLQPEDFATYYCLQEGWGPPTFGQGTKVEIKR

SEQ ID NO: 27 - protein, 579 aa, Artificial Sequence
  Humanised
QVQLVQSGAEVKKPGSSVKVSCKASGFYIKDTYMHWVRQAPGQGLEWMGTIDPANGNTKYVPKFQGRVTITADESTSTAYMELSSLRSEDTAVYYCARSIYDDYHYDDYYAMDYWGQGTLVTVSSASTKGPSVFPLAPSSKSTSGGTAALGCLVKDYFPEPVTVSWNSGALTSGVHTFPAVLQSSGLYSLSSVVTVPSSSLGTQTYICNVNHKPSNTKVDKKVEPKSCDKTHTCPPCPAPELLGGPSVFLFPPKPKDTLMISRTPEVTCVVVDVSHEDPEVKFNWYVDGVEVHNAKTKPREEQYNSTYRVVSVLTVLHQDWLNGKEYKCKVSNKALPAPIEKTISKAKGQPREPQVYTLPPSRDELTKNQVSLTCLVKGFYPSDIAVEWESNGQPENNYKTTPPVLDSDGSFFLYSKLTVDKSRWQQGNVFSCSVMHEALHNHYTQKSLSLSPGKTVAAPSGSEVQLLESGGGLVQPGGSLRLSCAASGFTFRNFGMGWVRQAPGKGLEWVSWIISSGTETYYADSVKGRFTISRDNSKNTLYLQMNSLRAEDTAVYYCAKSLGRFDYWGQGTLVTVSS

SEQ ID NO: 28 - protein, 574 aa, Artificial Sequence
  Humanised
QVQLVQSGAEVKKPGSSVKVSCKASGFYIKDTYMHWVRQAPGQGLEWMGTIDPANGNTKYVPKFQGRVTITADESTSTAYMELSSLRSEDTAVYYCARSIYDDYHYDDYYAMDYWGQGTLVTVSSASTKGPSVFPLAPSSKSTSGGTAALGCLVKDYFPEPVTVSWNSGALTSGVHTFPAVLQSSGLYSLSSVVTVPSSSLGTQTYICNVNHKPSNTKVDKKVEPKSCDKTHTCPPCPAPELLGGPSVFLFPPKPKDTLMISRTPEVTCVVVDVSHEDPEVKFNWYVDGVEVHNAKTKPREEQYNSTYRVVSVLTVLHQDWLNGKEYKCKVSNKALPAPIEKTISKAKGQPREPQVYTLPPSRDELTKNQVSLTCLVKGFYPSDIAVEWESNGQPENNYKTTPPVLDSDGSFFLYSKLTVDKSRWQQGNVFSCSVMHEALHNHYTQKSLSLSPGKGSASTKGPTGSDIQMTQSPSSLSASVGDRVTITCRASRPISDWLHWYQQKPGKAPKLLIAWASTLDSGVPSRFSGSGSGTDFTLTISSLQPEDFATYYCLQEGWGPPTFGQGTKVEIKR

SEQ ID NO: 29 - protein, 574 aa, Artificial Sequence
  Humanised
QVQLVQSGAEVKKPGSSVKVSCKASGFYIKDTYMHWVRQAPGQGLEWMGTIDPANGNTKYVPKFQGRVTITADESTSTAYMELSSLRSEDTAVYYCARSIYDDYHYDDYYAMDYWGQGTLVTVSSASTKGPSVFPLAPSSKSTSGGTAALGCLVKDYFPEPVTVSWNSGALTSGVHTFPAVLQSSGLYSLSSVVTVPSSSLGTQTYICNVNHKPSNTKVDKKVEPKSCDKTHTCPPCPAPELLGGPSVFLFPPKPKDTLMISRTPEVTCVVVDVSHEDPEVKFNWYVDGVEVHNAKTKPREEQYNSTYRVVSVLTVLHQDWLNGKEYKCKVSNKALPAPIEKTISKAKGQPREPQVYTLPPSRDELTKNQVSLTCLVKGFYPSDIAVEWESNGQPENNYKTTPPVLDSDGSFFLYSKLTVDKSRWQQGNVFSCSVMHEALHNHYTQKSLSLSPGKGSASTKGPTGSDIQMTQSPSSLSASVGDRVTITCRASRPISDWLHWYQQKPGKAPKLLIAWASSLYEGVPSRFSGSGSGTDFTLTISSLQPEDFATYYCLQEGWGPPTFGQGTKVEIKR

SEQ ID NO: 30 - protein, 574 aa, Artificial Sequence
  Humanised
QVQLVQSGAEVKKPGSSVKVSCKASGFYIKDTYMHWVRQAPGQGLEWMGTIDPANGNTKYVPKFQGRVTITADESTSTAYMELSSLRSEDTAVYYCARSIYDDYHYDDYYAMDYWGQGTLVTVSSASTKGPSVFPLAPSSKSTSGGTAALGCLVKDYFPEPVTVSWNSGALTSGVHTFPAVLQSSGLYSLSSVVTVPSSSLGTQTYICNVNHKPSNTKVDKKVEPKSCDKTHTCPPCPAPELLGGPSVFLFPPKPKDTLMISRTPEVTCVVVDVSHEDPEVKFNWYVDGVEVHNAKTKPREEQYNSTYRVVSVLTVLHQDWLNGKEYKCKVSNKALPAPIEKTISKAKGQPREPQVYTLPPSRDELTKNQVSLTCLVKGFYPSDIAVEWESNGQPENNYKTTPPVLDSDGSFFLYSKLTVDKSRWQQGNVFSCSVMHEALHNHYTQKSLSLSPGKGSASTKGPTGSDIQMTQSPSSLSASVGDRVTITCRASRPISDWLHWYQQKPGKAPKLLIAWASSLQGGVPSRFSGSGSGTDFTLTISSLQPEDFATYYCLQEGWGPPTFGQGTKVEIKR

SEQ ID NO: 31 - protein, 582 aa, Artificial Sequence
  Humanised
QVQLVQSGAEVKKPGSSVKVSCKASGFYIKDTYMHWVRQAPGQGLEWMGTIDPANGNTKYVPKFQGRVTITADESTSTAYMELSSLRSEDTAVYYCARSIYDDYHYDDYYAMDYWGQGTLVTVSSASTKGPSVFPLAPSSKSTSGGTAALGCLVKDYFPEPVTVSWNSGALTSGVHTFPAVLQSSGLYSLSSVVTVPSSSLGTQTYICNVNHKPSNTKVDKKVEPKSCDKTHTCPPCPAPELLGGPSVFLFPPKPKDTLMISRTPEVTCVVVDVSHEDPEVKFNWYVDGVEVHNAKTKPREEQYNSTYRVVSVLTVLHQDWLNGKEYKCKVSNKALPAPIEKTISKAKGQPREPQVYTLPPSRDELTKNQVSLTCLVKGFYPSDIAVEWESNGQPENNYKTTPPVLDSDGSFFLYSKLTVDKSRWQQGNVFSCSVMHEALHNHYTQKSLSLSPGKGSASTKGPTGSEVQLLESGGGLVQPGGSLRLSCAASGFTFRNFGMGWVRQAPGKGLEWVSWIISSGTETYYADSVKGRFTISRDNSKNTLYLQMNSLRAEDTAVYYCAKSLGRFDYWGQGTLVTVSS

SEQ ID NO: 32 - protein, 582 aa, Artificial Sequence
  Humanised
QVQLVQSGAEVKKPGSSVKVSCKASGFYIKDTYMHWVRQAPGQGLEWMGTIDPANGNTKYVPKFQGRVTITADESTSTAYMELSSLRSEDTAVYYCARSIYDDYHYDDYYAMDYWGQGTLVTVSSASTKGPSVFPLAPSSKSTSGGTAALGCLVKDYFPEPVTVSWNSGALTSGVHTFPAVLQSSGLYSLSSVVTVPSSSLGTQTYICNVNHKPSNTKVDKKVEPKSCDKTHTCPPCPAPELLGGPSVFLFPPKPKDTLMISRTPEVTCVVVDVSHEDPEVKFNWYVDGVEVHNAKTKPREEQYNSTYRVVSVLTVLHQDWLNGKEYKCKVSNKALPAPIEKTISKAKGQPREPQVYTLPPSRDELTKNQVSLTCLVKGFYPSDIAVEWESNGQPENNYKTTPPVLDSDGSFFLYSKLTVDKSRWQQGNVFSCSVMHEALHNHYTQKSLSLSPGKGSEPKSCDKTHTCPPCPGSDIQMTQSPSSLSASVGDRVTITCRASRPISDWLHWYQQKPGKAPKLLIAWASTLDSGVPSRFSGSGSGTDFTLTISSLQPEDFATYYCLQEGWGPPTFGQGTKVEIKR

SEQ ID NO: 33 - protein, 582 aa, Artificial Sequence
  Humanised
QVQLVQSGAEVKKPGSSVKVSCKASGFYIKDTYMHWVRQAPGQGLEWMGTIDPANGNTKYVPKFQGRVTITADESTSTAYMELSSLRSEDTAVYYCARSIYDDYHYDDYYAMDYWGQGTLVTVSSASTKGPSVFPLAPSSKSTSGGTAALGCLVKDYFPEPVTVSWNSGALTSGVHTFPAVLQSSGLYSLSSVVTVPSSSLGTQTYICNVNHKPSNTKVDKKVEPKSCDKTHTCPPCPAPELLGGPSVFLFPPKPKDTLMISRTPEVTCVVVDVSHEDPEVKFNWYVDGVEVHNAKTKPREEQYNSTYRVVSVLTVLHQDWLNGKEYKCKVSNKALPAPIEKTISKAKGQPREPQVYTLPPSRDELTKNQVSLTCLVKGFYPSDIAVEWESNGQPENNYKTTPPVLDSDGSFFLYSKLTVDKSRWQQGNVFSCSVMHEALHNHYTQKSLSLSPGKGSEPKSCDKTHTCPPCPGSDIQMTQSPSSLSASVGDRVTITCRASRPISDWLHWYQQKPGKAPKLLIAWASSLYEGVPSRFSGSGSGTDFTLTISSLQPEDFATYYCLQEGWGPPTFGQGTKVEIKR

SEQ ID NO: 34 - protein, 582 aa, Artificial Sequence
  Humanised
QVQLVQSGAEVKKPGSSVKVSCKASGFYIKDTYMHWVRQAPGQGLEWMGTIDPANGNTKYVPKFQGRVTITADESTSTAYMELSSLRSEDTAVYYCARSIYDDYHYDDYYAMDYWGQGTLVTVSSASTKGPSVFPLAPSSKSTSGGTAALGCLVKDYFPEPVTVSWNSGALTSGVHTFPAVLQSSGLYSLSSVVTVPSSSLGTQTYICNVNHKPSNTKVDKKVEPKSCDKTHTCPPCPAPELLGGPSVFLFPPKPKDTLMISRTPEVTCVVVDVSHEDPEVKFNWYVDGVEVHNAKTKPREEQYNSTYRVVSVLTVLHQDWLNGKEYKCKVSNKALPAPIEKTISKAKGQPREPQVYTLPPSRDELTKNQVSLTCLVKGFYPSDIAVEWESNGQPENNYKTTPPVLDSDGSFFLYSKLTVDKSRWQQGNVFSCSVMHEALHNHYTQKSLSLSPGKGSEPKSCDKTHTCPPCPGSDIQMTQSPSSLSASVGDRVTITCRASRPISDWLHWYQQKPGKAPKLLIAWASSLQGGVPSRFSGSGSGTDFTLTISSLQPEDFATYYCLQEGWGPPTFGQGTKVEIKR

SEQ ID NO: 35 - protein, 590 aa, Artificial Sequence
  Humanised
QVQLVQSGAEVKKPGSSVKVSCKASGFYIKDTYMHWVRQAPGQGLEWMGTIDPANGNTKYVPKFQGRVTITADESTSTAYMELSSLRSEDTAVYYCARSIYDDYHYDDYYAMDYWGQGTLVTVSSASTKGPSVFPLAPSSKSTSGGTAALGCLVKDYFPEPVTVSWNSGALTSGVHTFPAVLQSSGLYSLSSVVTVPSSSLGTQTYICNVNHKPSNTKVDKKVEPKSCDKTHTCPPCPAPELLGGPSVFLFPPKPKDTLMISRTPEVTCVVVDVSHEDPEVKFNWYVDGVEVHNAKTKPREEQYNSTYRVVSVLTVLHQDWLNGKEYKCKVSNKALPAPIEKTISKAKGQPREPQVYTLPPSRDELTKNQVSLTCLVKGFYPSDIAVEWESNGQPENNYKTTPPVLDSDGSFFLYSKLTVDKSRWQQGNVFSCSVMHEALHNHYTQKSLSLSPGKGSEPKSCDKTHTCPPCPGSEVQLLESGGGLVQPGGSLRLSCAASGFTFRNFGMGWVRQAPGKGLEWVSWIISSGTETYYADSVKGRFTISRDNSKNTLYLQMNSLRAEDTAVYYCAKSLGRFDYWGQGTLVTVSS

SEQ ID NO: 36 - protein, 585 aa, Artificial Sequence
  Humanised
QVQLVQSGAEVKKPGSSVKVSCKASGFYIKDTYMHWVRQAPGQGLEWMGTIDPANGNTKYVPKFQGRVTITADESTSTAYMELSSLRSEDTAVYYCARSIYDDYHYDDYYAMDYWGQGTLVTVSSASTKGPSVFPLAPSSKSTSGGTAALGCLVKDYFPEPVTVSWNSGALTSGVHTFPAVLQSSGLYSLSSVVTVPSSSLGTQTYICNVNHKPSNTKVDKKVEPKSCDKTHTCPPCPAPELLGGPSVFLFPPKPKDTLMISRTPEVTCVVVDVSHEDPEVKFNWYVDGVEVHNAKTKPREEQYNSTYRVVSVLTVLHQDWLNGKEYKCKVSNKALPAPIEKTISKAKGQPREPQVYTLPPSRDELTKNQVSLTCLVKGFYPSDIAVEWESNGQPENNYKTTPPVLDSDGSFFLYSKLTVDKSRWQQGNVFSCSVMHEALHNHYTQKSLSLSPGKGSELQLEESCAEAQDGELDGGSDIQMTQSPSSLSASVGDRVTITCRASRPISDWLHWYQQKPGKAPKLLIAWASTLDSGVPSRFSGSGSGTDFTLTISSLQPEDFATYYCLQEGWGPPTFGQGTKVEIKR

SEQ ID NO: 37 - protein, 585 aa, Artificial Sequence
  Humanised
QVQLVQSGAEVKKPGSSVKVSCKASGFYIKDTYMHWVRQAPGQGLEWMGTIDPANGNTKYVPKFQGRVTITADESTSTAYMELSSLRSEDTAVYYCARSIYDDYHYDDYYAMDYWGQGTLVTVSSASTKGPSVFPLAPSSKSTSGGTAALGCLVKDYFPEPVTVSWNSGALTSGVHTFPAVLQSSGLYSLSSVVTVPSSSLGTQTYICNVNHKPSNTKVDKKVEPKSCDKTHTCPPCPAPELLGGPSVFLFPPKPKDTLMISRTPEVTCVVVDVSHEDPEVKFNWYVDGVEVHNAKTKPREEQYNSTYRVVSVLTVLHQDWLNGKEYKCKVSNKALPAPIEKTISKAKGQPREPQVYTLPPSRDELTKNQVSLTCLVKGFYPSDIAVEWESNGQPENNYKTTPPVLDSDGSFFLYSKLTVDKSRWQQGNVFSCSVMHEALHNHYTQKSLSLSPGKGSELQLEESCAEAQDGELDGGSDIQMTQSPSSLSASVGDRVTITCRASRPISDWLHWYQQKPGKAPKLLIAWASSLYEGVPSRFSGSGSGTDFTLTISSLQPEDFATYYCLQEGWGPPTFGQGTKVEIKR

SEQ ID NO: 38 - protein, 585 aa, Artificial Sequence
  Humanised
QVQLVQSGAEVKKPGSSVKVSCKASGFYIKDTYMHWVRQAPGQGLEWMGTIDPANGNTKYVPKFQGRVTITADESTSTAYMELSSLRSEDTAVYYCARSIYDDYHYDDYYAMDYWGQGTLVTVSSASTKGPSVFPLAPSSKSTSGGTAALGCLVKDYFPEPVTVSWNSGALTSGVHTFPAVLQSSGLYSLSSVVTVPSSSLGTQTYICNVNHKPSNTKVDKKVEPKSCDKTHTCPPCPAPELLGGPSVFLFPPKPKDTLMISRTPEVTCVVVDVSHEDPEVKFNWYVDGVEVHNAKTKPREEQYNSTYRVVSVLTVLHQDWLNGKEYKCKVSNKALPAPIEKTISKAKGQPREPQVYTLPPSRDELTKNQVSLTCLVKGFYPSDIAVEWESNGQPENNYKTTPPVLDSDGSFFLYSKLTVDKSRWQQGNVFSCSVMHEALHNHYTQKSLSLSPGKGSELQLEESCAEAQDGELDGGSDIQMTQSPSSLSASVGDRVTITCRASRPISDWLHWYQQKPGKAPKLLIAWASSLQGGVPSRFSGSGSGTDFTLTISSLQPEDFATYYCLQEGWGPPTFGQGTKVEIKR

SEQ ID NO: 39 - protein, 593 aa, Artificial Sequence
  Humanised
QVQLVQSGAEVKKPGSSVKVSCKASGFYIKDTYMHWVRQAPGQGLEWMGTIDPANGNTKYVPKFQGRVTITADESTSTAYMELSSLRSEDTAVYYCARSIYDDYHYDDYYAMDYWGQGTLVTVSSASTKGPSVFPLAPSSKSTSGGTAALGCLVKDYFPEPVTVSWNSGALTSGVHTFPAVLQSSGLYSLSSVVTVPSSSLGTQTYICNVNHKPSNTKVDKKVEPKSCDKTHTCPPCPAPELLGGPSVFLFPPKPKDTLMISRTPEVTCVVVDVSHEDPEVKFNWYVDGVEVHNAKTKPREEQYNSTYRVVSVLTVLHQDWLNGKEYKCKVSNKALPAPIEKTISKAKGQPREPQVYTLPPSRDELTKNQVSLTCLVKGFYPSDIAVEWESNGQPENNYKTTPPVLDSDGSFFLYSKLTVDKSRWQQGNVFSCSVMHEALHNHYTQKSLSLSPGKGSELQLEESCAEAQDGELDGGSEVQLLESGGGLVQPGGSLRLSCAASGFTFRNFGMGWVRQAPGKGLEWVSWIISSGTETYYADSVKGRFTISRDNSKNTLYLQMNSLRAEDTAVYYCAKSLGRFDYWGQGTLVTVSS

SEQ ID NO: 40 - protein, 457 aa, Artificial Sequence
  Humanised
QVQLVQSGAEVKKPGSSVKVSCKASGFYIKDTYMHWVRQAPGQGLEWMGTIDPANGNTKYVPKFQGRVTITADESTSTAYMELSSLRSEDTAVYYCARSIYDDYHYDDYYAMDYWGQGTLVTVSSASTKGPSVFPLAPSSKSTSGGTAALGCLVKDYFPEPVTVSWNSGALTSGVHTFPAVLQSSGLYSLSSVVTVPSSSLGTQTYICNVNHKPSNTKVDKKVEPKSCDKTHTCPPCPAPELLGGPSVFLFPPKPKDTLMISRTPEVTCVVVDVSHEDPEVKFNWYVDGVEVHNAKTKPREEQYNSTYRVVSVLTVLHQDWLNGKEYKCKVSNKALPAPIEKTISKAKGQPREPQVYTLPPSRDELTKNQVSLTCLVKGFYPSDIAVEWESNGQPENNYKTTPPVLDSDGSFFLYSKLTVDKSRWQQGNVFSCSVMHEALHNHYTQKSLSLSPGKGS

SEQ ID NO: 41 - protein, 466 aa, Artificial Sequence
  Humanised
QVQLVQSGAEVKKPGSSVKVSCKASGFYIKDTYMHWVRQAPGQGLEWMGTIDPANGNTKYVPKFQGRVTITADESTSTAYMELSSLRSEDTAVYYCARSIYDDYHYDDYYAMDYWGQGTLVTVSSASTKGPSVFPLAPSSKSTSGGTAALGCLVKDYFPEPVTVSWNSGALTSGVHTFPAVLQSSGLYSLSSVVTVPSSSLGTQTYICNVNHKPSNTKVDKKVEPKSCDKTHTCPPCPAPELLGGPSVFLFPPKPKDTLMISRTPEVTCVVVDVSHEDPEVKFNWYVDGVEVHNAKTKPREEQYNSTYRVVSVLTVLHQDWLNGKEYKCKVSNKALPAPIEKTISKAKGQPREPQVYTLPPSRDELTKNQVSLTCLVKGFYPSDIAVEWESNGQPENNYKTTPPVLDSDGSFFLYSKLTVDKSRWQQGNVFSCSVMHEALHNHYTQKSLSLSPGKGSASTKGPTGS

SEQ ID NO: 42 - protein, 474 aa, Artificial Sequence
  Humanised
QVQLVQSGAEVKKPGSSVKVSCKASGFYIKDTYMHWVRQAPGQGLEWMGTIDPANGNTKYVPKFQGRVTITADESTSTAYMELSSLRSEDTAVYYCARSIYDDYHYDDYYAMDYWGQGTLVTVSSASTKGPSVFPLAPSSKSTSGGTAALGCLVKDYFPEPVTVSWNSGALTSGVHTFPAVLQSSGLYSLSSVVTVPSSSLGTQTYICNVNHKPSNTKVDKKVEPKSCDKTHTCPPCPAPELLGGPSVFLFPPKPKDTLMISRTPEVTCVVVDVSHEDPEVKFNWYVDGVEVHNAKTKPREEQYNSTYRVVSVLTVLHQDWLNGKEYKCKVSNKALPAPIEKTISKAKGQPREPQVYTLPPSRDELTKNQVSLTCLVKGFYPSDIAVEWESNGQPENNYKTTPPVLDSDGSFFLYSKLTVDKSRWQQGNVFSCSVMHEALHNHYTQKSLSLSPGKGSEPKSCDKTHTCPPCPGS

SEQ ID NO: 43 - protein, 477 aa, Artificial Sequence
  Humanised
QVQLVQSGAEVKKPGSSVKVSCKASGFYIKDTYMHWVRQAPGQGLEWMGTIDPANGNTKYVPKFQGRVTITADESTSTAYMELSSLRSEDTAVYYCARSIYDDYHYDDYYAMDYWGQGTLVTVSSASTKGPSVFPLAPSSKSTSGGTAALGCLVKDYFPEPVTVSWNSGALTSGVHTFPAVLQSSGLYSLSSVVTVPSSSLGTQTYICNVNHKPSNTKVDKKVEPKSCDKTHTCPPCPAPELLGGPSVFLFPPKPKDTLMISRTPEVTCVVVDVSHEDPEVKFNWYVDGVEVHNAKTKPREEQYNSTYRVVSVLTVLHQDWLNGKEYKCKVSNKALPAPIEKTISKAKGQPREPQVYTLPPSRDELTKNQVSLTCLVKGFYPSDIAVEWESNGQPENNYKTTPPVLDSDGSFFLYSKLTVDKSRWQQGNVFSCSVMHEALHNHYTQKSLSLSPGKGSELQLEESCAEAQDGELDGGS

SEQ ID NO: 44 - protein, 332 aa, Artificial Sequence
  Humanised
DIVMTQSPLSLPVTPGEPASISCRSSQNIVHINGNTYLEWYLQKPGQSPRLLIYKISDRFSGVPDRFSGSGSGTDFTLKISRVEADDVGIYYCFQGSHVPWTFGQGTKLEIKRTVAAPSVFIFPPSDEQLKSGTASVVCLLNNFYPREAKVQWKVDNALQSGNSQESVTEQDSKDSTYSLSSTLTLSKADYEKHKVYACEVTHQGLSSPVTKSFNRGECGGGGSDIQMTQSPSSLSASVGDRVTITCRASRPISDWLHWYQQKPGKAPKLLIAWASTLDSGVPSRFSGSGSGTDFTLTISSLQPEDFATYYCLQEGWGPPTFGQGTKVEIKR

SEQ ID NO: 45 - protein, 332 aa, Artificial Sequence
  Humanised
DIVMTQSPLSLPVTPGEPASISCRSSQNIVHINGNTYLEWYLQKPGQSPRLLIYKISDRFSGVPDRFSGSGSGTDFTLKISRVEADDVGIYYCFQGSHVPWTFGQGTKLEIKRTVAAPSVFIFPPSDEQLKSGTASVVCLLNNFYPREAKVQWKVDNALQSGNSQESVTEQDSKDSTYSLSSTLTLSKADYEKHKVYACEVTHQGLSSPVTKSFNRGECGGGGSDIQMTQSPSSLSASVGDRVTITCRASRPISDWLHWYQQKPGKAPKLLIAWASSLYEGVPSRFSGSGSGTDFTLTISSLQPEDFATYYCLQEGWGPPTFGQGTKVEIKR

SEQ ID NO: 46 - protein, 332 aa, Artificial Sequence
  Humanised
DIVMTQSPLSLPVTPGEPASISCRSSQNIVHINGNTYLEWYLQKPGQSPRLLIYKISDRFSGVPDRFSGSGSGTDFTLKISRVEADDVGIYYCFQGSHVPWTFGQGTKLEIKRTVAAPSVFIFPPSDEQLKSGTASVVCLLNNFYPREAKVQWKVDNALQSGNSQESVTEQDSKDSTYSLSSTLTLSKADYEKHKVYACEVTHQGLSSPVTKSFNRGECGGGGSDIQMTQSPSSLSASVGDRVTITCRASRPISDWLHWYQQKPGKAPKLLIAWASSLQGGVPSRFSGSGSGTDFTLTISSLQPEDFATYYCLQEGWGPPTFGQGTKVEIKR

SEQ ID NO: 47 - protein, 340 aa, Artificial Sequence
  Humanised
DIVMTQSPLSLPVTPGEPASISCRSSQNIVHINGNTYLEWYLQKPGQSPRLLIYKISDRFSGVPDRFSGSGSGTDFTLKISRVEADDVGIYYCFQGSHVPWTFGQGTKLEIKRTVAAPSVFIFPPSDEQLKSGTASVVCLLNNFYPREAKVQWKVDNALQSGNSQESVTEQDSKDSTYSLSSTLTLSKADYEKHKVYACEVTHQGLSSPVTKSFNRGECGGGGSEVQLLESGGGLVQPGGSLRLSCAASGFTFRNFGMGWVRQAPGKGLEWVSWIISSGTETYYADSVKGRFTISRDNSKNTLYLQMNSLRAEDTAVYYCAKSLGRFDYWGQGTLVTVSS

SEQ ID NO: 48 - protein, 571 aa, Artificial Sequence
  Humanised
QVTLRESGPALVKPTQTLTLTCTFSGFSLSTSGMGVSWIRQPPGKGLEWLAHIYWDDDKRYNPSLKSRLTISKDTSRNQVVLTMTNMDPVDTATYYCARRETVFYWYFDVWGRGTLVTVSSASTKGPSVFPLAPSSKSTSGGTAALGCLVKDYFPEPVTVSWNSGALTSGVHTFPAVLQSSGLYSLSSVVTVPSSSLGTQTYICNVNHKPSNTKVDKKVEPKSCDKTHTCPPCPAPELLGGPSVFLFPPKPKDTLMISRTPEVTCVVVDVSHEDPEVKFNWYVDGVEVHNAKTKPREEQYNSTYRVVSVLTVLHQDWLNGKEYKCKVSNKALPAPIEKTISKAKGQPREPQVYTLPPSRDELTKNQVSLTCLVKGFYPSDIAVEWESNGQPENNYKTTPPVLDSDGSFFLYSKLTVDKSRWQQGNVFSCSVMHEALHNHYTQKSLSLSPGKGSGVQLLESGGGLVQPGGSLRLSCAASGFTFAWYDMGWVRQAPGKGLEWVSSIDWHGEVTYYADSVKGRFTISRDNSKNTLYLQMNSLRAEDTAVYYCATAEDEPGYDYWGQGTLVTVSS

SEQ ID NO: 49 - protein, 574 aa, Artificial Sequence
  Humanised
QVTLRESGPALVKPTQTLTLTCTFSGFSLSTSGMGVSWIRQPPGKGLEWLAHIYWDDDKRYNPSLKSRLTISKDTSRNQVVLTMTNMDPVDTATYYCARRETVFYWYFDVWGRGTLVTVSSASTKGPSVFPLAPSSKSTSGGTAALGCLVKDYFPEPVTVSWNSGALTSGVHTFPAVLQSSGLYSLSSVVTVPSSSLGTQTYICNVNHKPSNTKVDKKVEPKSCDKTHTCPPCPAPELLGGPSVFLFPPKPKDTLMISRTPEVTCVVVDVSHEDPEVKFNWYVDGVEVHNAKTKPREEQYNSTYRVVSVLTVLHQDWLNGKEYKCKVSNKALPAPIEKTISKAKGQPREPQVYTLPPSRDELTKNQVSLTCLVKGFYPSDIAVEWESNGQPENNYKTTPPVLDSDGSFFLYSKLTVDKSRWQQGNVFSCSVMHEALHNHYTQKSLSLSPGKGGGGSGVQLLESGGGLVQPGGSLRLSCAASGFTFAWYDMGWVRQAPGKGLEWVSSIDWHGEVTYYADSVKGRFTISRDNSKNTLYLQMNSLRAEDTAVYYCATAEDEPGYDYWGQGTLVTVSS

SEQ ID NO: 50 - protein, 577 aa, Artificial Sequence
  Humanised
QVTLRESGPALVKPTQTLTLTCTFSGFSLSTSGMGVSWIRQPPGKGLEWLAHIYWDDDKRYNPSLKSRLTISKDTSRNQVVLTMTNMDPVDTATYYCARRETVFYWYFDVWGRGTLVTVSSASTKGPSVFPLAPSSKSTSGGTAALGCLVKDYFPEPVTVSWNSGALTSGVHTFPAVLQSSGLYSLSSVVTVPSSSLGTQTYICNVNHKPSNTKVDKKVEPKSCDKTHTCPPCPAPELLGGPSVFLFPPKPKDTLMISRTPEVTCVVVDVSHEDPEVKFNWYVDGVEVHNAKTKPREEQYNSTYRVVSVLTVLHQDWLNGKEYKCKVSNKALPAPIEKTISKAKGQPREPQVYTLPPSRDELTKNQVSLTCLVKGFYPSDIAVEWESNGQPENNYKTTPPVLDSDGSFFLYSKLTVDKSRWQQGNVFSCSVMHEALHNHYTQKSLSLSPGKTVAAPSGSGVQLLESGGGLVQPGGSLRLSCAASGFTFAWYDMGWVRQAPGKGLEWVSSIDWHGEVTYYADSVKGRFTISRDNSKNTLYLQMNSLRAEDTAVYYCATAEDEPGYDYWGQGTLVTVSS

SEQ ID NO: 51 - protein, 580 aa, Artificial Sequence
  Humanised
QVTLRESGPALVKPTQTLTLTCTFSGFSLSTSGMGVSWIRQPPGKGLEWLAHIYWDDDKRYNPSLKSRLTISKDTSRNQVVLTMTNMDPVDTATYYCARRETVFYWYFDVWGRGTLVTVSSASTKGPSVFPLAPSSKSTSGGTAALGCLVKDYFPEPVTVSWNSGALTSGVHTFPAVLQSSGLYSLSSVVTVPSSSLGTQTYICNVNHKPSNTKVDKKVEPKSCDKTHTCPPCPAPELLGGPSVFLFPPKPKDTLMISRTPEVTCVVVDVSHEDPEVKFNWYVDGVEVHNAKTKPREEQYNSTYRVVSVLTVLHQDWLNGKEYKCKVSNKALPAPIEKTISKAKGQPREPQVYTLPPSRDELTKNQVSLTCLVKGFYPSDIAVEWESNGQPENNYKTTPPVLDSDGSFFLYSKLTVDKSRWQQGNVFSCSVMHEALHNHYTQKSLSLSPGKGSASTKGPTGSGVQLLESGGGLVQPGGSLRLSCAASGFTFAWYDMGWVRQAPGKGLEWVSSIDWHGEVTYYADSVKGRFTISRDNSKNTLYLQMNSLRAEDTAVYYCATAEDEPGYDYWGQGTLVTVSS

SEQ ID NO: 52 - protein, 588 aa, Artificial Sequence
  Humanised
QVTLRESGPALVKPTQTLTLTCTFSGFSLSTSGMGVSWIRQPPGKGLEWLAHIYWDDDKRYNPSLKSRLTISKDTSRNQVVLTMTNMDPVDTATYYCARRETVFYWYFDVWGRGTLVTVSSASTKGPSVFPLAPSSKSTSGGTAALGCLVKDYFPEPVTVSWNSGALTSGVHTFPAVLQSSGLYSLSSVVTVPSSSLGTQTYICNVNHKPSNTKVDKKVEPKSCDKTHTCPPCPAPELLGGPSVFLFPPKPKDTLMISRTPEVTCVVVDVSHEDPEVKFNWYVDGVEVHNAKTKPREEQYNSTYRVVSVLTVLHQDWLNGKEYKCKVSNKALPAPIEKTISKAKGQPREPQVYTLPPSRDELTKNQVSLTCLVKGFYPSDIAVEWESNGQPENNYKTTPPVLDSDGSFFLYSKLTVDKSRWQQGNVFSCSVMHEALHNHYTQKSLSLSPGKGSEPKSCDKTHTCPPCPGSGVQLLESGGGLVQPGGSLRLSCAASGFTFAWYDMGWVRQAPGKGLEWVSSIDWHGEVTYYADSVKGRFTISRDNSKNTLYLQMNSLRAEDTAVYYCATAEDEPGYDYWGQGTLVTVSS

SEQ ID NO: 53 - protein, 591 aa, Artificial Sequence
  Humanised
QVTLRESGPALVKPTQTLTLTCTFSGFSLSTSGMGVSWIRQPPGKGLEWLAHIYWDDDKRYNPSLKSRLTISKDTSRNQVVLTMTNMDPVDTATYYCARRETVFYWYFDVWGRGTLVTVSSASTKGPSVFPLAPSSKSTSGGTAALGCLVKDYFPEPVTVSWNSGALTSGVHTFPAVLQSSGLYSLSSVVTVPSSSLGTQTYICNVNHKPSNTKVDKKVEPKSCDKTHTCPPCPAPELLGGPSVFLFPPKPKDTLMISRTPEVTCVVVDVSHEDPEVKFNWYVDGVEVHNAKTKPREEQYNSTYRVVSVLTVLHQDWLNGKEYKCKVSNKALPAPIEKTISKAKGQPREPQVYTLPPSRDELTKNQVSLTCLVKGFYPSDIAVEWESNGQPENNYKTTPPVLDSDGSFFLYSKLTVDKSRWQQGNVFSCSVMHEALHNHYTQKSLSLSPGKGSELQLEESCAEAQDGELDGGSGVQLLESGGGLVQPGGSLRLSCAASGFTFAWYDMGWVRQAPGKGLEWVSSIDWHGEVTYYADSVKGRFTISRDNSKNTLYLQMNSLRAEDTAVYYCATAEDEPGYDYWGQGTLVTVSS

SEQ ID NO: 54 - protein, 338 aa, Artificial Sequence
  Humanised
DIVLTQSPSSLSASVGDRVTITCKASQSVDYDGDSYMNWYQQKPGKAPKLLIYAASNLESGIPSRFSGSGSGTDFTFTISSLQPEDIATYYCQQSNEDPPTFGQGTKVEIKRTVAAPSVFIFPPSDEQLKSGTASVVCLLNNFYPREAKVQWKVDNALQSGNSQESVTEQDSKDSTYSLSSTLTLSKADYEKHKVYACEVTHQGLSSPVTKSFNRGECGSGVQLLESGGGLVQPGGSLRLSCAASGFTFAWYDMGWVRQAPGKGLEWVSSIDWHGEVTYYADSVKGRFTISRDNSKNTLYLQMNSLRAEDTAVYYCATAEDEPGYDYWGQGTLVTVSS

SEQ ID NO: 55 - protein, 341 aa, Artificial Sequence
  Humanised
DIVLTQSPSSLSASVGDRVTITCKASQSVDYDGDSYMNWYQQKPGKAPKLLIYAASNLESGIPSRFSGSGSGTDFTFTISSLQPEDIATYYCQQSNEDPPTFGQGTKVEIKRTVAAPSVFIFPPSDEQLKSGTASVVCLLNNFYPREAKVQWKVDNALQSGNSQESVTEQDSKDSTYSLSSTLTLSKADYEKHKVYACEVTHQGLSSPVTKSFNRGECGGGGSGVQLLESGGGLVQPGGSLRLSCAASGFTFAWYDMGWVRQAPGKGLEWVSSIDWHGEVTYYADSVKGRFTISRDNSKNTLYLQMNSLRAEDTAVYYCATAEDEPGYDYWGQGTLVTVSS

SEQ ID NO: 56 - protein, 344 aa, Artificial Sequence
  Humanised
DIVLTQSPSSLSASVGDRVTITCKASQSVDYDGDSYMNWYQQKPGKAPKLLIYAASNLESGIPSRFSGSGSGTDFTFTISSLQPEDIATYYCQQSNEDPPTFGQGTKVEIKRTVAAPSVFIFPPSDEQLKSGTASVVCLLNNFYPREAKVQWKVDNALQSGNSQESVTEQDSKDSTYSLSSTLTLSKADYEKHKVYACEVTHQGLSSPVTKSFNRGECTVAAPSGSGVQLLESGGGLVQPGGSLRLSCAASGFTFAWYDMGWVRQAPGKGLEWVSSIDWHGEVTYYADSVKGRFTISRDNSKNTLYLQMNSLRAEDTAVYYCATAEDEPGYDYWGQGTLVTVSS

SEQ ID NO: 57 - protein, 345 aa, Artificial Sequence
  Humanised
DIVLTQSPSSLSASVGDRVTITCKASQSVDYDGDSYMNWYQQKPGKAPKLLIYAASNLESGIPSRFSGSGSGTDFTFTISSLQPEDIATYYCQQSNEDPPTFGQGTKVEIKRTVAAPSVFIFPPSDEQLKSGTASVVCLLNNFYPREAKVQWKVDNALQSGNSQESVTEQDSKDSTYSLSSTLTLSKADYEKHKVYACEVTHQGLSSPVTKSFNRGECASTKGPTGSGVQLLESGGGLVQPGGSLRLSCAASGFTFAWYDMGWVRQAPGKGLEWVSSIDWHGEVTYYADSVKGRFTISRDNSKNTLYLQMNSLRAEDTAVYYCATAEDEPGYDYWGQGTLVTVSS

SEQ ID NO: 58 - protein, 353 aa, Artificial Sequence
  Humanised
DIVLTQSPSSLSASVGDRVTITCKASQSVDYDGDSYMNWYQQKPGKAPKLLIYAASNLESGIPSRFSGSGSGTDFTFTISSLQPEDIATYYCQQSNEDPPTFGQGTKVEIKRTVAAPSVFIFPPSDEQLKSGTASVVCLLNNFYPREAKVQWKVDNALQSGNSQESVTEQDSKDSTYSLSSTLTLSKADYEKHKVYACEVTHQGLSSPVTKSFNRGECEPKSCDKTHTCPPCPGSGVQLLESGGGLVQPGGSLRLSCAASGFTFAWYDMGWVRQAPGKGLEWVSSIDWHGEVTYYADSVKGRFTISRDNSKNTLYLQMNSLRAEDTAVYYCATAEDEPGYDYWGQGTLVTVSS

SEQ ID NO: 59 - protein, 356 aa, Artificial Sequence
  Humanised
DIVLTQSPSSLSASVGDRVTITCKASQSVDYDGDSYMNWYQQKPGKAPKLLIYAASNLESGIPSRFSGSGSGTDFTFTISSLQPEDIATYYCQQSNEDPPTFGQGTKVEIKRTVAAPSVFIFPPSDEQLKSGTASVVCLLNNFYPREAKVQWKVDNALQSGNSQESVTEQDSKDSTYSLSSTLTLSKADYEKHKVYACEVTHQGLSSPVTKSFNRGECELQLEESCAEAQDGELDGGSGVQLLESGGGLVQPGGSLRLSCAASGFTFAWYDMGWVRQAPGKGLEWVSSIDWHGEVTYYADSVKGRFTISRDNSKNTLYLQMNSLRAEDTAVYYCATAEDEPGYDYWGQGTLVTVSS

SEQ ID NO: 60 - DNA, 324 bp, Homo Sapiens
gacatccagatgacccaatcaccatcctccctgtctgcatctgtaggagaccgtgtcaccatcacttgccgggcaagtcgccccattagcgactggttacattggtatcagcagaaaccagggaaagcccccaagctcctgatcgcctgggcgtcctcgttgtacgagggggtcccatcacgtttcagtggcagtgggtcggggacagatttcactctcaccatcagcagtctgcaacccgaagatttcgctacgtactactgtttgcaggaggggtggggtcctccgacgttcggccaagggaccaaggtggaaatcaaacgg

SEQ ID NO: 61 - DNA, 324 bp, Homo Sapiens
gacatccagatgacccaatcaccatcctccctgtctgcatctgtaggagaccgtgtcaccatcacttgccgggcaagtcgccccattagcgactggttacattggtatcagcagaaaccagggaaagcccccaagctcctgatcgcctgggcgtccagcttgcaggggggggtcccatcacgtttcagtggcagtgggtcggggacagatttcactctcaccatcagcagtctgcaacccgaagatttcgctacgtactactgtttgcaggaggggtggggtcctccgacgttcggccaagggaccaaggtggaaatcaaacgg

SEQ ID NO: 62 - protein, 129 aa, Homo Sapiens [sequence omitted]

SEQ ID NO: 63 - protein, 112 aa, Homo Sapiens
GPVPPSTALRELIEELVNITQNQKAPLCNGSMVWSINLTAGMYCAALESLINVSGCSAIEKTQRMLSGFCPHKVSAGQFSSLHVRDTKIEVAQFVKDLLLHLKKLFREGRFN

SEQ ID NO: 64 - protein, 19 aa, unknown
  Mammalian Signal Sequence
MGWSCIILFLVATATGVHS

SEQ ID NO: 65 - protein, 449 aa, Artificial Sequence
  Humanised
QVTLRESGPALVKPTQTLTLTCTVSGFSLTSYSVHWVRQPPGKGLEWLGVIWASGGTDYNSALMSRLSISKDTSRNQVVLTMTNMDPVDTATYYCARDPPSSLLRLDYWGRGTLVTVSSASTKGPSVFPLAPSSKSTSGGTAALGCLVKDYFPEPVTVSWNSGALTSGVHTFPAVLQSSGLYSLSSVVTVPSSSLGTQTYICNVNHKPSNTKVDKKVEPKSCDKTHTCPPCPAPELLGGPSVFLFPPKPKDTLMISRTPEVTCVVVDVSHEDPEVKFNWYVDGVEVHNAKTKPREEQYNSTYRVVSVLTVLHQDWLNGKEYKCKVSNKALPAPIEKTISKAKGQPREPQVYTLPPSRDELTKNQVSLTCLVKGFYPSDIAVEWESNGQPENNYKTTPPVLDSDGSFFLYSKLTVDKSRWQQGNVFSCSVMHEALHNHYTQKSLSLSPGK

SEQ ID NO: 66 - protein, 220 aa, Artificial Sequence
  Humanised
DIVMTQSPDSLAVSLGERATINCKSSQSLLNSGNQKNYLAWYQQKPGQPPKLLIYGASTRESGVPDRFSGSGSGTDFTLTISSLQAEDVAVYYCQNVHSFPFTFGGGTKLEIKRTVAAPSVFIFPPSDEQLKSGTASVVCLLNNFYPREAKVQWKVDNALQSGNSQESVTEQDSKDSTYSLSSTLTLSKADYEKHKVYACEVTHQGLSSPVTKSFNRGEC

SEQ ID NO: 67 - protein, 456 aa, Artificial Sequence
  Humanised
QVQLVQSGAEVKKPGASVKVSCKVSGEISTGYYFHWVRQAPGKGLEWMGRIDPEDDSTKYAERFKDRVTMTEDTSTDTAYMELSSLRSEDTAVYYCTTWRIYRDSSGRPFYVMDAWGQGTLVTVSSASTKGPSVFPLAPSSKSTSGGTAALGCLVKDYFPEPVTVSWNSGALTSGVHTFPAVLQSSGLYSLSSVVTVPSSSLGTQTYICNVNHKPSNTKVDKKVEPKSCDKTHTCPPCPAPELLGGPSVFLFPPKPKDTLMISRTPEVTCVVVDVSHEDPEVKFNWYVDGVEVHNAKTKPREEQYNSTYRVVSVLTVLHQDWLNGKEYKCKVSNKALPAPIEKTISKAKGQPREPQVYTLPPSRDELTKNQVSLTCLVKGFYPSDIAVEWESNGQPENNYKTTPPVLDSDGSFFLYSKLTVDKSRWQQGNVFSCSVMHEALHNHYTQKSLSLSPGK

SEQ ID NO: 68 - protein, 214 aa, Artificial Sequence
  Humanised
DIQMTQSPSSVSASVGDRVTITCLASEDIYTYLTWYQQKPGKAPKLLIYGANKLQDGVPSRFSGSGSGTDYTLTISSLQPEDFATYYCLQGSKFPLTFGQGTKLEIKRTVAAPSVFIFPPSDEQLKSGTASVVCLLNNFYPREAKVQWKVDNALQSGNSQESVTEQDSKDSTYSLSSTLTLSKADYEKHKVYACEVTHQGLSSPVTKSFNRGEC

SEQ ID NO: 69 - protein, 577 aa, Artificial Sequence
  Humanised
QVQLVQSGAEVKKPGASVKVSCKVSGEISTGYYFHWVRQAPGKGLEWMGRIDPEDDSTKYAERFKDRVTMTEDTSTDTAYMELSSLRSEDTAVYYCTTWRIYRDSSGRPFYVMDAWGQGTLVTVSSASTKGPSVFPLAPSSKSTSGGTAALGCLVKDYFPEPVTVSWNSGALTSGVHTFPAVLQSSGLYSLSSVVTVPSSSLGTQTYICNVNHKPSNTKVDKKVEPKSCDKTHTCPPCPAPELLGGPSVFLFPPKPKDTLMISRTPEVTCVVVDVSHEDPEVKFNWYVDGVEVHNAKTKPREEQYNSTYRVVSVLTVLHQDWLNGKEYKCKVSNKALPAPIEKTISKAKGQPREPQVYTLPPSRDELTKNQVSLTCLVKGFYPSDIAVEWESNGQPENNYKTTPPVLDSDGSFFLYSKLTVDKSRWQQGNVFSCSVMHEALHNHYTQKSLSLSPGKGGGGSEVQLLESGGGLVQPGGSLRLSCAASGFTFRNFGMGWVRQAPGKGLEWVSWIISSGTETYYADSVKGRFTISRDNSKNTLYLQMNSLRAEDTAVYYCAKSLGRFDYWGQGTLVTVSS

SEQ ID NO: 70 - protein, 337 aa, Artificial Sequence
  Humanised
DIQMTQSPSSVSASVGDRVTITCLASEDIYTYLTWYQQKPGKAPKLLIYGANKLQDGVPSRFSGSGSGTDYTLTISSLQPEDFATYYCLQGSKFPLTFGQGTKLEIKRTVAAPSVFIFPPSDEQLKSGTASVVCLLNNFYPREAKVQWKVDNALQSGNSQESVTEQDSKDSTYSLSSTLTLSKADYEKHKVYACEVTHQGLSSPVTKSFNRGECGGGGSGVQLLESGGGLVQPGGSLRLSCAASGFTFAWYDMGWVRQAPGKGLEWVSSIDWHGEVTYYADSVKGRFTISRDNSKNTLYLQMNSLRAEDTAVYYCATAEDEPGYDYWGQGTLVTVSS

SEQ ID NO: 71 - protein, 570 aa, Artificial Sequence
  Humanised
QVTLRESGPALVKPTQTLTLTCTVSGFSLTSYSVHWVRQPPGKGLEWLGVIWASGGTDYNSALMSRLSISKDTSRNQVVLTMTNMDPVDTATYYCARDPPSSLLRLDYWGRGTLVTVSSASTKGPSVFPLAPSSKSTSGGTAALGCLVKDYFPEPVTVSWNSGALTSGVHTFPAVLQSSGLYSLSSVVTVPSSSLGTQTYICNVNHKPSNTKVDKKVEPKSCDKTHTCPPCPAPELLGGPSVFLFPPKPKDTLMISRTPEVTCVVVDVSHEDPEVKFNWYVDGVEVHNAKTKPREEQYNSTYRVVSVLTVLHQDWLNGKEYKCKVSNKALPAPIEKTISKAKGQPREPQVYTLPPSRDELTKNQVSLTCLVKGFYPSDIAVEWESNGQPENNYKTTPPVLDSDGSFFLYSKLTVDKSRWQQGNVFSCSVMHEALHNHYTQKSLSLSPGKGGGGSEVQLLESGGGLVQPGGSLRLSCAASGFTFRNFGMGWVRQAPGKGLEWVSWIISSGTETYYADSVKGRFTISRDNSKNTLYLQMNSLRAEDTAVYYCAKSLGRFDYWGQGTLVTVSS

SEQ ID NO: 72 - protein, 343 aa, Artificial Sequence
  Humanised
DIVMTQSPDSLAVSLGERATINCKSSQSLLNSGNQKNYLAWYQQKPGQPPKLLIYGASTRESGVPDRFSGSGSGTDFTLTISSLQAEDVAVYYCQNVHSFPFTFGGGTKLEIKRTVAAPSVFIFPPSDEQLKSGTASVVCLLNNFYPREAKVQWKVDNALQSGNSQESVTEQDSKDSTYSLSSTLTLSKADYEKHKVYACEVTHQGLSSPVTKSFNRGECGGGGSGVQLLESGGGLVQPGGSLRLSCAASGFTFAWYDMGWVRQAPGKGLEWVSSIDWHGEVTYYADSVKGRFTISRDNSKNTLYLQMNSLRAEDTAVYYCATAEDEPGYDYWGQGTLVTVSS

SEQ ID NO: 73 - protein, 214 aa, Artificial Sequence
  Humanised
DIQMTQSPSSLSASVGDRVTITCRASQGIRNYLAWYQQKPGKAPKLLIYAASTLQSGVPSRFSGSGSGTDFTLTISSLQPEDVATYYCQRYNRAPYTFGQGTKVEIKRTVAAPSVFIFPPSDEQLKSGTASVVCLLNNFYPREAKVQWKVDNALQSGNSQESVTEQDSKDSTYSLSSTLTLSKADYEKHKVYACEVTHQGLSSPVTKSFNRGEC

SEQ ID NO: 74 - protein, 562 aa, Artificial Sequence
  Humanised
EVQLVESGGGLVQPGRSLRLSCAASGFTFDDYAMHWVRQAPGKGLEWVSAITWNSGHIDYADSVEGRFTISRDNAKNSLYLQMNSLRAEDTAVYYCAKVSYLSTASSLDYWGQGTLVTVSSASTKGPSVFPLAPSSKSTSGGTAALGCLVKDYFPEPVTVSWNSGALTSGVHTFPAVLQSSGLYSLSSVVTVPSSSLGTQTYICNVNHKPSNTKVDKKVEPKSCDKTHTCPPCPAPELLGGPSVFLFPPKPKDTLMISRTPEVTCVVVDVSHEDPEVKFNWYVDGVEVHNAKTKPREEQYNSTYRVVSVLTVLHQDWLNGKEYKCKVSNKALPAPIEKTISKAKGQPREPQVYTLPPSRDELTKNQVSLTCLVKGFYPSDIAVEWESNGQPENNYKTTPPVLDSDGSFFLYSKLTVDKSRWQQGNVFSCSVMHEALHNHYTQKSLSLSPGKSTGDIQMTQSPSSLSASVGDRVTITCRASQWIGNLLDWYQQKPGKAPKLLIYYASFLQSGVPSRFSGSGYGTDFTLTISSLQPEDFATYYCQQANPAPLTFGQGTKVEIKR

SEQ ID NO: 75 - protein, 570 aa, Artificial Sequence
  Humanised
EVQLVESGGGLVQPGRSLRLSCAASGFTFDDYAMHWVRQAPGKGLEWVSAITWNSGHIDYADSVEGRFTISRDNAKNSLYLQMNSLRAEDTAVYYCAKVSYLSTASSLDYWGQGTLVTVSSASTKGPSVFPLAPSSKSTSGGTAALGCLVKDYFPEPVTVSWNSGALTSGVHTFPAVLQSSGLYSLSSVVTVPSSSLGTQTYICNVNHKPSNTKVDKKVEPKSCDKTHTCPPCPAPELLGGPSVFLFPPKPKDTLMISRTPEVTCVVVDVSHEDPEVKFNWYVDGVEVHNAKTKPREEQYNSTYRVVSVLTVLHQDWLNGKEYKCKVSNKALPAPIEKTISKAKGQPREPQVYTLPPSRDELTKNQVSLTCLVKGFYPSDIAVEWESNGQPENNYKTTPPVLDSDGSFFLYSKLTVDKSRWQQGNVFSCSVMHEALHNHYTQKSLSLSPGKSTGEVQLLVSGGGLVQPGGSLRLSCAASGFTFKAYPMMWVRQAPGKGLEWVSEISPSGSYTYYADSVKGRFTISRDNSKNTLYLQMNSLRAEDTAVYYCAKDPRKLDYWGQGTLVTVSS

SEQ ID NO: 76 - protein, 569 aa, Artificial Sequence
  Humanised
EVQLLVSGGGLVQPGGSLRLSCAASGFTFKAYPMMWVRQAPGKGLEWVSEISPSGSYTYYADSVKGRFTISRDNSKNTLYLQMNSLRAEDTAVYYCAKDPRKLDYWGQGTLVTVSSASTKGPSEVQLLESGGGLVQPGGSLRLSCAASGFTFSSYAMSWVRQAPGKGLEWVSAISGSGGSTYYADSVKGRFTISRDNSKNTLYLQMNSLRAEDTAVYYCAKSYGAFDYWGQGTLVTVSSASTKGPSVFPLAPSSKSTSGGTAALGCLVKDYFPEPVTVSWNSGALTSGVHTFPAVLQSSGLYSLSSVVTVPSSSLGTQTYICNVNHKPSNTKVDKKVEPKSCDKTHTCPPCPAPELLGGPSVFLFPPKPKDTLMISRTPEVTCVVVDVSHEDPEVKFNWYVDGVEVHNAKTKPREEQYNSTYRVVSVLTVLHQDWLNGKEYKCKVSNKALPAPIEKTISKAKGQPREPQVYTLPPSRDELTKNQVSLTCLVKGFYPSDIAVEWESNGQPENNYKTTPPVLDSDGSFFLYSKLTVDKSRWQQGNVFSCSVMHEALHNHYTQKSLSLSPGK

SEQ ID NO: 77 - protein, 328 aa, Artificial Sequence
  Humanised
DIQMTQSPSSLSASVGDRVTITCRASQDIYLNLDWYQQKPGKAPKLLINFGSELQSGVPSRFSGSGYGTDFTLTISSLQPEDFATYYCQPSFYFPYTFGQGTKVEIKRTVAAPSDIQMTQSPSSLSASVGDRVTITCRASQSISSYLNWYQQKPGKAPKLLIYAASSLQSGVPSRFSGSGSGTDFTLTISSLQPEDFATYYCQQSYSTPNTFGQGTKVEIKRTVAAPSVFIFPPSDEQLKSGTASVVCLLNNFYPREAKVQWKVDNALQSGNSQESVTEQDSKDSTYSLSSTLTLSKADYEKHKVYACEVTHQGLSSPVTKSFNRGEC

SEQ ID NO: 78 - protein, 574 aa, Artificial Sequence
  Humanised
EVQLLESGGGLVQPGGSLRLSCAASGFTFGAYPMMWVRQAPGKGLEWVSEISPSGSYTYYADSVKGRFTISRDNSKNTLYLQMNSLRAEDTAVYYCAKDPRKFDYWGQGTLVTVSSASTKGPSEVQLVESGGGLVQPGRSLRLSCAASGFTFDDYAMHWVRQAPGKGLEWVSAITWNSGHIDYADSVEGRFTISRDNAKNSLYLQMNSLRAEDTAVYYCAKVSYLSTASSLDYWGQGTLVTVSSASTKGPSVFPLAPSSKSTSGGTAALGCLVKDYFPEPVTVSWNSGALTSGVHTFPAVLQSSGLYSLSSVVTVPSSSLGTQTYICNVNHKPSNTKVDKKVEPKSCDKTHTCPPCPAPELLGGPSVFLFPPKPKDTLMISRTPEVTCVVVDVSHEDPEVKFNWYVDGVEVHNAKTKPREEQYNSTYRVVSVLTVLHQDWLNGKEYKCKVSNKALPAPIEKTISKAKGQPREPQVYTLPPSRDELTKNQVSLTCLVKGFYPSDIAVEWESNGQPENNYKTTPPVLDSDGSFFLYSKLTVDKSRWQQGNVFSCSVMHEALHNHYTQKSLSLSPGK

SEQ ID NO: 79 - protein, 328 aa, Artificial Sequence
  Humanised
DIQMTQSPSSLSASVGDRVTITCRASQWIGNLLDWYQQKPGKAPKLLIYYASFLQSGVPSRFSGSGYGTDFTLTISSLQPEDFATYYCQQANPAPLTFGQGTKVEIKRTVAAPSDIQMTQSPSSLSASVGDRVTITCRASQGIRNYLAWYQQKPGKAPKLLIYAASTLQSGVPSRFSGSGSGTDFTLTISSLQPEDVATYYCQRYNRAPYTFGQGTKVEIKRTVAAPSVFIFPPSDEQLKSGTASVVCLLNNFYPREAKVQWKVDNALQSGNSQESVTEQDSKDSTYSLSSTLTLSKADYEKHKVYACEVTHQGLSSPVTKSFNRGEC

SEQ ID NO: 80 - protein, 14 aa, Mus Musculus
WILYYGRSKWYFDV

SEQ ID NO: 81 - protein, 17 aa, Mus Musculus
NINPNNGGTNYNQKFKD

SEQ ID NO: 82 - protein, 5 aa, Mus Musculus
DYYMN

SEQ ID NO: 83 - protein, 16 aa, Mus Musculus
RSSQSIVQSNGDTYLE

SEQ ID NO: 84 - protein, 7 aa, Mus Musculus
RISNRFS

SEQ ID NO: 85 - protein, 9 aa, Mus M usculus
FQGSHVPYT

SEQ ID NO: 86 - protein, 7 aa, Mus Musculus
RVSNRFS

SEQ ID NO: 87 - protein, 571 aa, Artificial Sequence
  Humanised
QVQLVQSGAEVKKPGSSVKVSCKASGFYIKDTYMHWVRQAPGQGLEWMGTIDPANGNTKYVPKFQGRVTITADESTSTAYMELSSLRSEDTAVYYCARSIYDDYHYDDYYAMDYWGQGTLVTVSSASTKGPSVFPLAPSSKSTSGGTAALGCLVKDYFPEPVTVSWNSGALTSGVHTFPAVLQSSGLYSLSSVVTVPSSSLGTQTYICNVNHKPSNTKVDKKVEPKSCDKTHTCPPCPAPELLGGPSVFLFPPKPKDTLMISRTPEVTCVVVDVSHEDPEVKFNWYVDGVEVHNAKTKPREEQYNSTYRVVSVLTVLHQDWLNGKEYKCKVSNKALPAPIEKTISKAKGQPREPQVYTLPPSRDELTKNQVSLTCLVKGFYPSDIAVEWESNGQPENNYKTTPPVLDSDGSFFLYSKLTVDKSRWQQGNVFSCSVMHEALHNHYTQKSLSLSPGKEVQLLESGGGLVQPGGSLRLSCAASGFTFRNFGMGWVRQAPGKGLEWVSWIISSGTETYYADSVKGRFTISRDNSKNTLYLQMNSLRAEDTAVYYCAKSLGRFDYWGQGTLVTVSS

SEQ ID NO: 88 - protein, 577 aa, Artificial Sequence
  Humanised
QVQLVQSGAEVKKPGSSVKVSCKASGFYIKDTYMHWVRQAPGQGLEWMGTIDPANGNTKYVPKFQGRVTITADESTSTAYMELSSLRSEDTAVYYCARSIYDDYHYDDYYAMDYWGQGTLVTVSSASTKGPSVFPLAPSSKSTSGGTAALGCLVKDYFPEPVTVSWNSGALTSGVHTFPAVLQSSGLYSLSSVVTVPSSSLGTQTYICNVNHKPSNTKVDKKVEPKSCDKTHTCPPCPAPELLGGPSVFLFPPKPKDTLMISRTPEVTCVVVDVSHEDPEVKFNWYVDGVEVHNAKTKPREEQYNSTYRVVSVLTVLHQDWLNGKEYKCKVSNKALPAPIEKTISKAKGQPREPQVYTLPPSRDELTKNQVSLTCLVKGFYPSDIAVEWESNGQPENNYKTTPPVLDSDGSFFLYSKLTVDKSRWQQGNVFSCSVMHEALHNHYTQKSLSLSPGKTVAAPSEVQLLESGGGLVQPGGSLRLSCAASGFTFRNFGMGWVRQAPGKGLEWVSWIISSGTETYYADSVKGRFTISRDNSKNTLYLQMNSLRAEDTAVYYCAKSLGRFDYWGQGTLVTVSS

SEQ ID NO: 89 - protein, 578 aa, Artificial Sequence
  Humanised
QVQLVQSGAEVKKPGSSVKVSCKASGFYIKDTYMHWVRQAPGQGLEWMGTIDPANGNTKYVPKFQGRVTITADESTSTAYMELSSLRSEDTAVYYCARSIYDDYHYDDYYAMDYWGQGTLVTVSSASTKGPSVFPLAPSSKSTSGGTAALGCLVKDYFPEPVTVSWNSGALTSGVHTFPAVLQSSGLYSLSSVVTVPSSSLGTQTYICNVNHKPSNTKVDKKVEPKSCDKTHTCPPCPAPELLGGPSVFLFPPKPKDTLMISRTPEVTCVVVDVSHEDPEVKFNWYVDGVEVHNAKTKPREEQYNSTYRVVSVLTVLHQDWLNGKEYKCKVSNKALPAPIEKTISKAKGQPREPQVYTLPPSRDELTKNQVSLTCLVKGFYPSDIAVEWESNGQPENNYKTTPPVLDSDGSFFLYSKLTVDKSRWQQGNVFSCSVMHEALHNHYTQKSLSLSPGKASTKGPTEVQLLESGGGLVQPGGSLRLSCAASGFTFRNFGMGWVRQAPGKGLEWVSWIISSGTETYYADSVKGRFTISRDNSKNTLYLQMNSLRAEDTAVYYCAKSLGRFDYWGQGTLVTVSS

SEQ ID NO: 90 - protein, 578 aa, Artificial Sequence
  Humanised
QVQLVQSGAEVKKPGSSVKVSCKASGFYIKDTYMHWVRQAPGQGLEWMGTIDPANGNTKYVPKFQGRVTITADESTSTAYMELSSLRSEDTAVYYCARSIYDDYHYDDYYAMDYWGQGTLVTVSSASTKGPSVFPLAPSSKSTSGGTAALGCLVKDYFPEPVTVSWNSGALTSGVHTFPAVLQSSGLYSLSSVVTVPSSSLGTQTYICNVNHKPSNTKVDKKVEPKSCDKTHTCPPCPAPELLGGPSVFLFPPKPKDTLMISRTPEVTCVVVDVSHEDPEVKFNWYVDGVEVHNAKTKPREEQYNSTYRVVSVLTVLHQDWLNGKEYKCKVSNKALPAPIEKTISKAKGQPREPQVYTLPPSRDELTKNQVSLTCLVKGFYPSDIAVEWESNGQPENNYKTTPPVLDSDGSFFLYSKLTVDKSRWQQGNVFSCSVMHEALHNHYTQKSLSLSPGKASTKGPSEVQLLESGGGLVQPGGSLRLSCAASGFTFRNFGMGWVRQAPGKGLEWVSWIISSGTETYYADSVKGRFTISRDNSKNTLYLQMNSLRAEDTAVYYCAKSLGRFDYWGQGTLVTVSS

SEQ ID NO: 91 - protein, 569 aa, Artificial Sequence
  Humanised
QVTLRESGPALVKPTQTLTLTCTFSGFSLSTSGMGVSWIRQPPGKGLEWLAHIYWDDDKRYNPSLKSRLTISKDTSRNQVVLTMTNMDPVDTATYYCARRETVFYWYFDVWGRGTLVTVSSASTKGPSVFPLAPSSKSTSGGTAALGCLVKDYFPEPVTVSWNSGALTSGVHTFPAVLQSSGLYSLSSVVTVPSSSLGTQTYICNVNHKPSNTKVDKKVEPKSCDKTHTCPPCPAPELLGGPSVFLFPPKPKDTLMISRTPEVTCVVVDVSHEDPEVKFNWYVDGVEVHNAKTKPREEQYNSTYRVVSVLTVLHQDWLNGKEYKCKVSNKALPAPIEKTISKAKGQPREPQVYTLPPSRDELTKNQVSLTCLVKGFYPSDIAVEWESNGQPENNYKTTPPVLDSDGSFFLYSKLTVDKSRWQQGNVFSCSVMHEALHNHYTQKSLSLSPGKGVQLLESGGGLVQPGGSLRLSCAASGFTFAWYDMGWVRQAPGKGLEWVSSIDWHGEVTYYADSVKGRFTISRDNSKNTLYLQMNSLRAEDTAVYYCATAEDEPGYDYWGQGTLVTVSS

SEQ ID NO: 92 - protein, 575 aa, Artificial Sequence
  Humanised
QVTLRESGPALVKPTQTLTLTCTFSGFSLSTSGMGVSWIRQPPGKGLEWLAHIYWDDDKRYNPSLKSRLTISKDTSRNQVVLTMTNMDPVDTATYYCARRETVFYWYFDVWGRGTLVTVSSASTKGPSVFPLAPSSKSTSGGTAALGCLVKDYFPEPVTVSWNSGALTSGVHTFPAVLQSSGLYSLSSVVTVPSSSLGTQTYICNVNHKPSNTKVDKKVEPKSCDKTHTCPPCPAPELLGGPSVFLFPPKPKDTLMISRTPEVTCVVVDVSHEDPEVKFNWYVDGVEVHNAKTKPREEQYNSTYRVVSVLTVLHQDWLNGKEYKCKVSNKALPAPIEKTISKAKGQPREPQVYTLPPSRDELTKNQVSLTCLVKGFYPSDIAVEWESNGQPENNYKTTPPVLDSDGSFFLYSKLTVDKSRWQQGNVFSCSVMHEALHNHYTQKSLSLSPGKTVAAPSGVQLLESGGGLVQPGGSLRLSCAASGFTFAWYDMGWVRQAPGKGLEWVSSIDWHGEVTYYADSVKGRFTISRDNSKNTLYLQMNSLRAEDTAVYYCATAEDEPGYDYWGQGTLVTVSS

SEQ ID NO: 93 - protein, 576 aa, Artificial Sequence
  Humanised
QVTLRESGPALVKPTQTLTLTCTFSGFSLSTSGMGVSWIRQPPGKGLEWLAHIYWDDDKRYNPSLKSRLTISKDTSRNQVVLTMTNMDPVDTATYYCARRETVFYWYFDVWGRGTLVTVSSASTKGPSVFPLAPSSKSTSGGTAALGCLVKDYFPEPVTVSWNSGALTSGVHTFPAVLQSSGLYSLSSVVTVPSSSLGTQTYICNVNHKPSNTKVDKKVEPKSCDKTHTCPPCPAPELLGGPSVFLFPPKPKDTLMISRTPEVTCVVVDVSHEDPEVKFNWYVDGVEVHNAKTKPREEQYNSTYRVVSVLTVLHQDWLNGKEYKCKVSNKALPAPIEKTISKAKGQPREPQVYTLPPSRDELTKNQVSLTCLVKGFYPSDIAVEWESNGQPENNYKTTPPVLDSDGSFFLYSKLTVDKSRWQQGNVFSCSVMHEALHNHYTQKSLSLSPGKASTKGPTGVQLLESGGGLVQPGGSLRLSCAASGFTFAWYDMGWVRQAPGKGLEWVSSIDWHGEVTYYADSVKGRFTISRDNSKNTLYLQMNSLRAEDTAVYYCATAEDEPGYDYWGQGTLVTVSS

SEQ ID NO: 94 - protein, 576 aa, Artificial Sequence
  Humanised
QVTLRESGPALVKPTQTLTLTCTFSGFSLSTSGMGVSWIRQPPGKGLEWLAHIYWDDDKRYNPSLKSRLTISKDTSRNQVVLTMTNMDPVDTATYYCARRETVFYWYFDVWGRGTLVTVSSASTKGPSVFPLAPSSKSTSGGTAALGCLVKDYFPEPVTVSWNSGALTSGVHTFPAVLQSSGLYSLSSVVTVPSSSLGTQTYICNVNHKPSNTKVDKKVEPKSCDKTHTCPPCPAPELLGGPSVFLFPPKPKDTLMISRTPEVTCVVVDVSHEDPEVKFNWYVDGVEVHNAKTKPREEQYNSTYRVVSVLTVLHQDWLNGKEYKCKVSNKALPAPIEKTISKAKGQPREPQVYTLPPSRDELTKNQVSLTCLVKGFYPSDIAVEWESNGQPENNYKTTPPVLDSDGSFFLYSKLTVDKSRWQQGNVFSCSVMHEALHNHYTQKSLSLSPGKASTKGPSGVQLLESGGGLVQPGGSLRLSCAASGFTFAWYDMGWVRQAPGKGLEWVSSIDWHGEVTYYADSVKGRFTISRDNSKNTLYLQMNSLRAEDTAVYYCATAEDEPGYDYWGQGTLVTVSS

SEQ ID NO: 95 - protein, 578 aa, Artificial Sequence
  Humanised
QVTLRESGPALVKPTQTLTLTCTFSGFSLSTSGMGVSWIRQPPGKGLEWLAHIYWDDDKRYNPSLKSRLTISKDTSRNQVVLTMTNMDPVDTATYYCARRETVFYWYFDVWGRGTLVTVSSASTKGPSVFPLAPSSKSTSGGTAALGCLVKDYFPEPVTVSWNSGALTSGVHTFPAVLQSSGLYSLSSVVTVPSSSLGTQTYICNVNHKPSNTKVDKKVEPKSCDKTHTCPPCPAPELLGGPSVFLFPPKPKDTLMISRTPEVTCVVVDVSHEDPEVKFNWYVDGVEVHNAKTKPREEQYNSTYRVVSVLTVLHQDWLNGKEYKCKVSNKALPAPIEKTISKAKGQPREPQVYTLPPSRDELTKNQVSLTCLVKGFYPSDIAVEWESNGQPENNYKTTPPVLDSDGSFFLYSKLTVDKSRWQQGNVFSCSVMHEALHNHYTQKSLSLSPGKGSASTKGPSGVQLLESGGGLVQPGGSLRLSCAASGFTFAWYDMGWVRQAPGKGLEWVSSIDWHGEVTYYADSVKGRFTISRDNSKNTLYLQMNSLRAEDTAVYYCATAEDEPGYDYWGQGTLVTVSS

SEQ ID NO: 96 - protein, 578 aa, Artificial Sequence
  Humanised
QVTLRESGPALVKPTQTLTLTCTFSGFSLSTSGMGVSWIRQPPGKGLEWLAHIYWDDDKRYNPSLKSRLTISKDTSRNQVVLTMTNMDPVDTATYYCARRETVFYWYFDVWGRGTLVTVSSASTKGPSVFPLAPSSKSTSGGTAALGCLVKDYFPEPVTVSWNSGALTSGVHTFPAVLQSSGLYSLSSVVTVPSSSLGTQTYICNVNHKPSNTKVDKKVEPKSCDKTHTCPPCPAPELLGGPSVFLFPPKPKDTLMISRTPEVTCVVVDVSHEDPEVKFNWYVDGVEVHNAKTKPREEQYNSTYRVVSVLTVLHQDWLNGKEYKCKVSNKALPAPIEKTISKAKGQPREPQVYTLPPSRDELTKNQVSLTCLVKGFYPSDIAVEWESNGQPENNYKTTPPVLDSDGSFFLYSKLTVDKSRWQQGNVFSCSVMHEALHNHYTQKSLSLSPGKGSASTKGPTGVQLLESGGGLVQPGGSLRLSCAASGFTFAWYDMGWVRQAPGKGLEWVSSIDWHGEVTYYADSVKGRFTISRDNSKNTLYLQMNSLRAEDTAVYYCATAEDEPGYDYWGQGTLVTVSS

SEQ ID NO: 97 - protein, 11 aa, Mus Musculus
GYSITSDFAWN

SEQ ID NO: 98 - protein, 14 aa, Mus Musculus
GYISYSGNYNPSLK

SEQ ID NO: 99 - protein, 9 aa, Mus Musculus
VTAGRGFPY

SEQ ID NO: 100 - protein, 11 aa, Mus Musculus
HSSQDINSNIG

SEQ ID NO: 101 - protein, 7 aa, Mus Musculus
HGINLDD

SEQ ID NO: 102 - protein, 9 aa, Mus Musculus
VQYAQFPWT

SEQ ID NO: 103 - protein, 16 aa, Homo Sapiens
CGADSYEMEEDGVRKC

SEQ ID NO: 104 - protein, 6 aa, Mus Musculus
SDFAWN

SEQ ID NO: 105 - protein, 13 aa, Mus Musculus
YISYSGNYNPSLK

SEQ ID NO: 106 - protein, 7 aa, Mus Musculus
AGRGFPY

SEQ ID NO: 107 - protein, 14 aa, Mus Musculus
YISYSGNYNPSLKS

SEQ ID NO: 108 - protein, 577 aa, Artificial Sequence
  Humanised
QVQLVQSGAEVKKPGASVKVSCKASGYTFTDYYMNWVRQAPGQGLEWMGNINPNNGGTNYNQKFKDRVTMTTDTSTSTAYMELRSLRSDDTAVYYCARWILYYGRSKWYFDVWGRGTLVTVSSASTKGPSVFPLAPSSKSTSGGTAALGCLVKDYFPEPVTVSWNSGALTSGVHTFPAVLQSSGLYSLSSVVTVPSSSLGTQTYICNVNHKPSNTKVDKKVEPKSCDKTHTCPPCPAPELLGGPSVFLFPPKPKDTLMISRTPEVTCVVVDVSHEDPEVKFNWYVDGVEVHNAKTKPREEQYNSTYRVVSVLTVLHQDWLNGKEYKCKVSNKALPAPIEKTISKAKGQPREPQVYTLPPSRDELTKNQVSLTCLVKGFYPSDIAVEWESNGQPENNYKTTPPVLDSDGSFFLYSKLTVDKSRWQQGNVFSCSVMHEALHNHYTQKSLSLSPGKTVAAPSGSEVQLLVSGGGLVQPGGSLRLSCAASGFTFKAYPMMWVRQAPGKGLEWVSEISPSGSYTYYADSVKGRFTISRDNSKNTLYLQMNSLRAEDTAVYYCAKDPRKLDYWGQGTLVTVSS

SEQ ID NO: 109 - protein, 571 aa, Artificial Sequence
  Humanised
QVQLVQSGAEVKKPGASVKVSCKASGYTFTDYYMNWVRQAPGQGLEWMGNINPNNGGTNYNQKFKDRVTMTTDTSTSTAYMELRSLRSDDTAVYYCARWILYYGRSKWYFDVWGRGTLVTVSSASTKGPSVFPLAPSSKSTSGGTAALGCLVKDYFPEPVTVSWNSGALTSGVHTFPAVLQSSGLYSLSSVVTVPSSSLGTQTYICNVNHKPSNTKVDKKVEPKSCDKTHTCPPCPAPELLGGPSVFLFPPKPKDTLMISRTPEVTCVVVDVSHEDPEVKFNWYVDGVEVHNAKTKPREEQYNSTYRVVSVLTVLHQDWLNGKEYKCKVSNKALPAPIEKTISKAKGQPREPQVYTLPPSRDELTKNQVSLTCLVKGFYPSDIAVEWESNGQPENNYKTTPPVLDSDGSFFLYSKLTVDKSRWQQGNVFSCSVMHEALHNHYTQKSLSLSPGKGSEVQLLVSGGGLVQPGGSLRLSCAASGFTFKAYPMMWVRQAPGKGLEWVSEISPSGSYTYYADSVKGRFTISRDNSKNTLYLQMNSLRAEDTAVYYCAKDPRKLDYWGQGTLVTVSS

SEQ ID NO: 110 - protein, 453 aa, Artificial Sequence
  Humanised
QVQLVQSGAEVKKPGASVKVSCKASGYTFTDYYMNWVRQAPGQGLEWMGNINPNNGGTNYNQKFKDRVTMTTDTSTSTAYMELRSLRSDDTAVYYCARWILYYGRSKWYFDVWGRGTLVTVSSASTKGPSVFPLAPSSKSTSGGTAALGCLVKDYFPEPVTVSWNSGALTSGVHTFPAVLQSSGLYSLSSVVTVPSSSLGTQTYICNVNHKPSNTKVDKKVEPKSCDKTHTCPPCPAPELLGGPSVFLFPPKPKDTLMISRTPEVTCVVVDVSHEDPEVKFNWYVDGVEVHNAKTKPREEQYNSTYRVVSVLTVLHQDWLNGKEYKCKVSNKALPAPIEKTISKAKGQPREPQVYTLPPSRDELTKNQVSLTCLVKGFYPSDIAVEWESNGQPENNYKTTPPVLDSDGSFFLYSKLTVDKSRWQQGNVFSCSVMHEALHNHYTQKSLSLSPGK

SEQ ID NO: 111 - protein, 343 aa, Artificial Sequence
  Humanised
DIVMTQSPLSLPVTPGEPASISCRSSQSIVQSNGDTYLEWYLQKPGQSPQLLIYRVSNRFSGVPDRFSGSGSGTDFTLKISRVEAEDVGVYYCFQGSHVPYTFGQGTKLEIKRTVAAPSVFIFPPSDEQLKSGTASVVCLLNNFYPREAKVQWKVDNALQSGNSQESVTEQDSKDSTYSLSSTLTLSKADYEKHKVYACEVTHQGLSSPVTKSFNRGECTVAAPSGSEVQLLVSGGGLVQPGGSLRLSCAASGFTFKAYPMMWVRQAPGKGLEWVSEISPSGSYTYYADSVKGRFTISRDNSKNTLYLQMNSLRAEDTAVYYCAKDPRKLDYWGQGTLVTVSS

SEQ ID NO: 112 - protein, 337 aa, Artificial Sequence
  Humanised
DIVMTQSPLSLPVTPGEPASISCRSSQSIVQSNGDTYLEWYLQKPGQSPQLLIYRVSNRFSGVPDRFSGSGSGTDFTLKISRVEAEDVGVYYCFQGSHVPYTFGQGTKLEIKRTVAAPSVFIFPPSDEQLKSGTASVVCLLNNFYPREAKVQWKVDNALQSGNSQESVTEQDSKDSTYSLSSTLTLSKADYEKHKVYACEVTHQGLSSPVTKSFNRGECGSEVQLLVSGGGLVQPGGSLRLSCAASGFTFKAYPMMWVRQAPGKGLEWVSEISPSGSYTYYADSVKGRFTISRDNSKNTLYLQMNSLRAEDTAVYYCAKDPRKLDYWGQGTLVTVSS

SEQ ID NO: 113 - protein, 219 aa, Artificial Sequence
  Humanised
DIVMTQSPLSLPVTPGEPASISCRSSQSIVQSNGDTYLEWYLQKPGQSPQLLIYRVSNRFSGVPDRFSGSGSGTDFTLKISRVEAEDVGVYYCFQGSHVPYTFGQGTKLEIKRTVAAPSVFIFPPSDEQLKSGTASVVCLLNNFYPREAKVQWKVDNALQSGNSQESVTEQDSKDSTYSLSSTLTLSKADYEKHKVYACEVTHQGLSSPVTKSFNRGEC

SEQ ID NO: 114 - protein, 122 aa, Artificial Sequence
  Humanised
QVQLKQSGPGLVQSSQSLSITCTISGFSLTSHGIYWLRQSPGKGLEWLGVIWSGGSADYNAAFISRLSISKDNSKSQVFFKMNSLQADDTAIYYCARSPYYYRSSLYAMDYWGQGTSVTVSS

SEQ ID NO: 115 - protein, 109 aa, Artificial Sequence
  Humanised
NIVLTQSPKSMSMSIGERVTLSCKASENVGTYVSWYQQKAEQSPKLLIYGASNRHTGVPDRFTGSGSSTDFTLTISSVQAEDLADYHCGQSYSDPLTFGAGTKLELKRA

SEQ ID NO: 116 - protein, 577 aa, Artificial Sequence
  Humanised
QVQLQQPGAELVKPGASVKMSCKASGYTFTSYNMHWVKQTPGRGLEWIGAIYPGNGDTSYNQKFKGKATLTADKSSSTAYMQLSSLTSEDSAVYYCARSTYYGGDWYFNVWGAGTLVTVSSASTKGPSVFPLAPSSKSTSGGTAALGCLVKDYFPEPVTVSWNSGALTSGVHTFPAVLQSSGLYSLSSVVTVPSSSLGTQTYICNVNHKPSNTKVDKKVEPKSCDKTHTCPPCPAPELLGGPSVFLFPPKPKDTLMISRTPEVTCVVVDVSHEDPEVKFNWYVDGVEVHNAKTKPREEQYNSTYRVVSVLTVLHQDWLNGKEYKCKVSNKALPAPIEKTISKAKGQPREPQVYTLPPSRDELTKNQVSLTCLVKGFYPSDIAVEWESNGQPENNYKTTPPVLDSDGSFFLYSKLTVDKSRWQQGNVFSCSVMHEALHNHYTQKSLSLSPGKTVAAPSGSGVQLLESGGGLVQPGGSLRLSCAASGFTFAWYDMGWVRQAPGKGLEWVSSIDWHGEVTYYADSVKGRFTISRDNSKNTLYLQMNSLRAEDTAVYYCATAEDEPGYDYWGQGTLVTVSS

SEQ ID NO: 117 - protein, 213 aa, Artificial Sequence
  Humanised
QIVLSQSPAILSASPGEKVTMTCRASSSVSYIHWFQQKPGSSPKPWIYATSNLASGVPVRFSGSGSGTSYSLTISRVEAEDAATYYCQQWTSNPPTFGGGTKLEIKRTVAAPSVFIFPPSDEQLKSGTASVVCLLNNFYPREAKVQWKVDNALQSGNSQESVTEQDSKDSTYSLSSTLTLSKADYEKHKVYACEVTHQGLSSPVTKSFNRGEC

SEQ ID NO: 118 - protein, 571 aa, Artificial Sequence
  Humanised
QVQLQQPGAELVKPGASVKMSCKASGYTFTSYNMHWVKQTPGRGLEWIGAIYPGNGDTSYNQKFKGKATLTADKSSSTAYMQLSSLTSEDSAVYYCARSTYYGGDWYFNVWGAGTLVTVSSASTKGPSVFPLAPSSKSTSGGTAALGCLVKDYFPEPVTVSWNSGALTSGVHTFPAVLQSSGLYSLSSVVTVPSSSLGTQTYICNVNHKPSNTKVDKKVEPKSCDKTHTCPPCPAPELLGGPSVFLFPPKPKDTLMISRTPEVTCVVVDVSHEDPEVKFNWYVDGVEVHNAKTKPREEQYNSTYRVVSVLTVLHQDWLNGKEYKCKVSNKALPAPIEKTISKAKGQPREPQVYTLPPSRDELTKNQVSLTCLVKGFYPSDIAVEWESNGQPENNYKTTPPVLDSDGSFFLYSKLTVDKSRWQQGNVFSCSVMHEALHNHYTQKSLSLSPGKGSGVQLLESGGGLVQPGGSLRLSCAASGFTFAWYDMGWVRQAPGKGLEWVSSIDWHGEVTYYADSVKGRFTISRDNSKNTLYLQMNSLRAEDTAVYYCATAEDEPGYDYWGQGTLVTVSS

SEQ ID NO: 119 - protein, 339 aa, Artificial Sequence
  Humanised
QIVLSQSPAILSASPGEKVTMTCRASSSVSYIHWFQQKPGSSPKPWIYATSNLASGVPVRFSGSGSGTSYSLTISRVEAEDAATYYCQQWTSNPPTFGGGTKLEIKRTVAAPSVFIFPPSDEQLKSGTASVVCLLNNFYPREAKVQWKVDNALQSGNSQESVTEQDSKDSTYSLSSTLTLSKADYEKHKVYACEVTHQGLSSPVTKSFNRGECTVAAPSGSGVQLLESGGGLVQPGGSLRLSCAASGFTFAWYDMGWVRQAPGKGLEWVSSIDWHGEVTYYADSVKGRFTISRDNSKNTLYLQMNSLRAEDTAVYYCATAEDEPGYDYWGQGTLVTVSS

SEQ ID NO: 120 - protein, 451 aa, Artificial Sequence
  Humanised
QVQLQQPGAELVKPGASVKMSCKASGYTFTSYNMHWVKQTPGRGLEWIGAIYPGNGDTSYNQKFKGKATLTADKSSSTAYMQLSSLTSEDSAVYYCARSTYYGGDWYFNVWGAGTLVTVSSASTKGPSVFPLAPSSKSTSGGTAALGCLVKDYFPEPVTVSWNSGALTSGVHTFPAVLQSSGLYSLSSVVTVPSSSLGTQTYICNVNHKPSNTKVDKKVEPKSCDKTHTCPPCPAPELLGGPSVFLFPPKPKDTLMISRTPEVTCVVVDVSHEDPEVKFNWYVDGVEVHNAKTKPREEQYNSTYRVVSVLTVLHQDWLNGKEYKCKVSNKALPAPIEKTISKAKGQPREPQVYTLPPSRDELTKNQVSLTCLVKGFYPSDIAVEWESNGQPENNYKTTPPVLDSDGSFFLYSKLTVDKSRWQQGNVFSCSVMHEALHNHYTQKSLSLSPGK

SEQ ID NO: 121 - protein, 333 aa, Artificial Sequence
  Humanised
QIVLSQSPAILSASPGEKVTMTCRASSSVSYIHWFQQKPGSSPKPWIYATSNLASGVPVRFSGSGSGTSYSLTISRVEAEDAATYYCQQWTSNPPTFGGGTKLEIKRTVAAPSVFIFPPSDEQLKSGTASVVCLLNNFYPREAKVQWKVDNALQSGNSQESVTEQDSKDSTYSLSSTLTLSKADYEKHKVYACEVTHQGLSSPVTKSFNRGECGSGVQLLESGGGLVQPGGSLRLSCAASGFTFAWYDMGWVRQAPGKGLEWVSSIDWHGEVTYYADSVKGRFTISRDNSKNTLYLQMNSLRAEDTAVYYCATAEDEPGYDYWGQGTLVTVSS

SEQ ID NO: 122 - DNA, 1713 bp, Artificial Sequence
  Humanised
caggtgcagctcgtgcagagcggcgccgaagtgaaaaagcccggcagcagcgtgaaggtgagctgcaaggcctccggcttctacatcaaggacacctacatgcactgggtcaggcaggctcctggccagggcctggagtggatgggcactatcgaccccgccaacggcaacaccaagtacgtgcccaagttccagggcagggtgaccatcaccgccgatgagagcaccagcaccgcctacatggaactgagcagcctgaggtctgaggacaccgccgtgtactattgcgccaggagcatctacgacgactaccactacgacgactactacgccatggactactggggacagggcacactagtgaccgtgtccagcgccagcaccaagggccccagcgtgttccccctggcccccagcagcaagagcaccagcggcggcacagccgccctgggctgcctggtgaaggactacttccccgaaccggtgaccgtgtcctggaacagcggagccctgaccagcggcgtgcacaccttccccgccgtgctgcagagcagcggcctgtacagcctgagcagcgtggtgaccgtgcccagcagcagcctgggcacccagacctacatctgtaacgtgaaccacaagcccagcaacaccaaggtggacaagaaggtggagcccaagagctgtgacaagacccacacctgccccccctgccctgcccccgagctgctgggaggccccagcgtgttcctgttcccccccaagcctaaggacaccctgatgatcagcagaacccccgaggtgacctgtgtggtggtggatgtgagccacgaggaccctgaggtgaagttcaactggtacgtggacggcgtggaggtgcacaatgccaagaccaagcccagggaggagcagtacaacagcacctaccgggtggtgtccgtgctgaccgtgctgcaccaggattggctgaacggcaaggagtacaagtgtaaggtgtccaacaaggccctgcctgcccctatcgagaaaaccatcagcaaggccaagggccagcccagagagccccaggtgtacaccctgccccctagcagagatgagctgaccaagaaccaggtgtccctgacctgcctggtgaagggcttctaccccagcgacatcgccgtggagtgggagagcaacggccagcccgagaacaactacaagaccaccccccctgtgctggacagcgatggcagcttcttcctgtacagcaagctgaccgtggacaagagcagatggcagcagggcaacgtgttcagctgctccgtgatgcacgaggccctgcacaatcactacacccagaagagcctgagcctgtcccctggcaagaccgtggccgccccctcgggatccgacatccagatgacccagagccccagcagcctgagcgccagcgtgggcgacagggtgaccattacctgcagggccagcaggcccatcagcgactggctgcactggtaccaacagaagcccggcaaggctcccaagctgctgatcgcctgggccagcagcctgcagggaggcgtgcccagcaggtttagcggcagcggcagcggcaccgacttcaccctcaccatctcttccctgcagcccgaggacttcgccacctactactgcctgcaggagggctgggggccccctactttcggccagggcaccaaggtggagatcaagagg

SEQ ID NO: 123 - protein, 607 aa, Artificial Sequence
  Humanised
QVQLVQSGAEVKKPGASVKVSCKASGYTFTDYYMNWVRQAPGQGLEWMGNINPNNGGTNYNQKFKDRVTMTTDTSTSTAYMELRSLRSDDTAVYYCARWILYYGRSKWYFDVWGRGTLVTVSSASTKGPSVFPLAPSSKSTSGGTAALGCLVKDYFPEPVTVSWNSGALTSGVHTFPAVLQSSGLYSLSSVVTVPSSSLGTQTYICNVNHKPSNTKVDKKVEPKSCDKTHTCPPCPAPELLGGPSVFLFPPKPKDTLMISRTPEVTCVVVDVSHEDPEVKFNWYVDGVEVHNAKTKPREEQYNSTYRVVSVLTVLHQDWLNGKEYKCKVSNKALPAPIEKTISKAKGQPREPQVYTLPPSRDELTKNQVSLTCLVKGFYPSDIAVEWESNGQPENNYKTTPPVLDSDGSFFLYSKLTVDKSRWQQGNVFSCSVMHEALHNHYTQKSLSLSPGKGSDGGGIRRSMSGTWYLKAMTVDREFPEMNLESVTPMTLTLLKGHNLEAKVTMLISGRCQEVKAVLGRTKERKKYTADGGKHVAYIIPSAVRDHVIFYSEGQLHGKPVRGVKLVGRDPKNNLEALEDFEKAAGARGLSTESILIPRQSETCSPG

SEQ ID NO: 124 - protein, 541 aa, Artificial Sequence
  Humanised
QVQLVQSGAEVKKPGASVKVSCKASGYTFTDYYMNWVRQAPGQGLEWMGNINPNNGGTNYNQKFKDRVTMTTDTSTSTAYMELRSLRSDDTAVYYCARWILYYGRSKWYFDVWGRGTLVTVSSASTKGPSVFPLAPSSKSTSGGTAALGCLVKDYFPEPVTVSWNSGALTSGVHTFPAVLQSSGLYSLSSVVTVPSSSLGTQTYICNVNHKPSNTKVDKKVEPKSCDKTHTCPPCPAPELLGGPSVFLFPPKPKDTLMISRTPEVTCVVVDVSHEDPEVKFNWYVDGVEVHNAKTKPREEQYNSTYRVVSVLTVLHQDWLNGKEYKCKVSNKALPAPIEKTISKAKGQPREPQVYTLPPSRDELTKNQVSLTCLVKGFYPSDIAVEWESNGQPENNYKTTPPVLDSDGSFFLYSKLTVDKSRWQQGNVFSCSVMHEALHNHYTQKSLSLSPGKGSEVVAATPTSLLISWRHPHFPTRYYRITYGETGGNSPVQEFTVPLQPPTATISGLKPGVDYTITVYAVTDGRNGRLLSIPISINYRT

SEQ ID NO: 125 - protein, 613 aa, Artificial Sequence
  Humanised
QVQLVQSGAEVKKPGASVKVSCKASGYTFTDYYMNWVRQAPGQGLEWMGNINPNNGGTNYNQKFKDRVTMTTDTSTSTAYMELRSLRSDDTAVYYCARWILYYGRSKWYFDVWGRGTLVTVSSASTKGPSVFPLAPSSKSTSGGTAALGCLVKDYFPEPVTVSWNSGALTSGVHTFPAVLQSSGLYSLSSVVTVPSSSLGTQTYICNVNHKPSNTKVDKKVEPKSCDKTHTCPPCPAPELLGGPSVFLFPPKPKDTLMISRTPEVTCVVVDVSHEDPEVKFNWYVDGVEVHNAKTKPREEQYNSTYRVVSVLTVLHQDWLNGKEYKCKVSNKALPAPIEKTISKAKGQPREPQVYTLPPSRDELTKNQVSLTCLVKGFYPSDIAVEWESNGQPENNYKTTPPVLDSDGSFFLYSKLTVDKSRWQQGNVFSCSVMHEALHNHYTQKSLSLSPGKTVAAPSGSDGGGIRRSMSGTWYLKAMTVDREFPEMNLESVTPMTLTLLKGHNLEAKVTMLISGRCQEVKAVLGRTKERKKYTADGGKHVAYIIPSAVRDHVIFYSEGQLHGKPVRGVKLVGRDPKNNLEALEDFEKAAGARGLSTESILIPRQSETCSPG

SEQ ID NO: 126 - protein, 513 aa, Artificial Sequence
  Humanised
QVQLVQSGAEVKKPGASVKVSCKASGYTFTDYYMNWVRQAPGQGLEWMGNINPNNGGTNYNQKFKDRVTMTTDTSTSTAYMELRSLRSDDTAVYYCARWILYYGRSKWYFDVWGRGTLVTVSSASTKGPSVFPLAPSSKSTSGGTAALGCLVKDYFPEPVTVSWNSGALTSGVHTFPAVLQSSGLYSLSSVVTVPSSSLGTQTYICNVNHKPSNTKVDKKVEPKSCDKTHTCPPCPAPELLGGPSVFLFPPKPKDTLMISRTPEVTCVVVDVSHEDPEVKFNWYVDGVEVHNAKTKPREEQYNSTYRVVSVLTVLHQDWLNGKEYKCKVSNKALPAPIEKTISKAKGQPREPQVYTLPPSRDELTKNQVSLTCLVKGFYPSDIAVEWESNGQPENNYKTTPPVLDSDGSFFLYSKLTVDKSRWQQGNVFSCSVMHEALHNHYTQKSLSLSPGKGSVDNKFNKELRQAYWEIQALPNLNWTQSRAFIRSLYDDPSQSANLLAEAKKLNDAQAPK

SEQ ID NO: 127 - protein, 519 aa, Artificial Sequence
  Humanised
QVQLVQSGAEVKKPGASVKVSCKASGYTFTDYYMNWVRQAPGQGLEWMGNINPNNGGTNYNQKFKDRVTMTTDTSTSTAYMELRSLRSDDTAVYYCARWILYYGRSKWYFDVWGRGTLVTVSSASTKGPSVFPLAPSSKSTSGGTAALGCLVKDYFPEPVTVSWNSGALTSGVHTFPAVLQSSGLYSLSSVVTVPSSSLGTQTYICNVNHKPSNTKVDKKVEPKSCDKTHTCPPCPAPELLGGPSVFLFPPKPKDTLMISRTPEVTCVVVDVSHEDPEVKFNWYVDGVEVHNAKTKPREEQYNSTYRVVSVLTVLHQDWLNGKEYKCKVSNKALPAPIEKTISKAKGQPREPQVYTLPPSRDELTKNQVSLTCLVKGFYPSDIAVEWESNGQPENNYKTTPPVLDSDGSFFLYSKLTVDKSRWQQGNVFSCSVMHEALHNHYTQKSLSLSPGKTVAAPSGSVDNKFNKELRQAYWEIQALPNLNWTQSRAFIRSLYDDPSQSANLLAEAKKLNDAQAPK

SEQ ID NO: 128 - protein, 578 aa, Artificial Sequence
  Humanised
QVQLVQSGAEVKKPGASVKVSCKASGYTFTDYYMNWVRQAPGQGLEWMGNINPNNGGTNYNQKFKDRVTMTTDTSTSTAYMELRSLRSDDTAVYYCARWILYYGRSKWYFDVWGRGTLVTVSSASTKGPSVFPLAPSSKSTSGGTAALGCLVKDYFPEPVTVSWNSGALTSGVHTFPAVLQSSGLYSLSSVVTVPSSSLGTQTYICNVNHKPSNTKVDKKVEPKSCDKTHTCPPCPAPELLGGPSVFLFPPKPKDTLMISRTPEVTCVVVDVSHEDPEVKFNWYVDGVEVHNAKTKPREEQYNSTYRVVSVLTVLHQDWLNGKEYKCKVSNKALPAPIEKTISKAKGQPREPQVYTLPPSRDELTKNQVSLTCLVKGFYPSDIAVEWESNGQPENNYKTTPPVLDSDGSFFLYSKLTVDKSRWQQGNVFSCSVMHEALHNHYTQKSLSLSPGKGSDLGKKLLEAARAGQDDEVRILMANGADVNAKDEYGLTPLYLATAHGHLEIVEVLLKNGADVNAVDAIGFTPLHLAAFIGHLEIAEVLLKHGADVNAQDKFGKTAFDISIGNGNEDLAEILQKL

SEQ ID NO: 129 - protein, 584 aa, Artificial Sequence [sequence omitted]

SEQ ID NO: 130 - protein, 574 aa, Artificial Sequence
  Humanised
QVTLRESGPALVKPTQTLTLTCTFSGFSLSTSGMGVSWIRQPPGKGLEWLAHIYWDDDKRYNPSLKSRLTISKDTSRNQVVLTMTNMDPVDTATYYCARRETVFYWYFDVWGRGTLVTVSSASTKGPSVFPLAPSSKSTSGGTAALGCLVKDYFPEPVTVSWNSGALTSGVHTFPAVLQSSGLYSLSSVVTVPSSSLGTQTYICNVNHKPSNTKVDKKVEPKSCDKTHTCPPCPAPELLGGPSVFLFPPKPKDTLMISRTPEVTCVVVDVSHEDPEVKFNWYVDGVEVHNAKTKPREEQYNSTYRVVSVLTVLHQDWLNGKEYKCKVSNKALPAPIEKTISKAKGQPREPQVYTLPPSRDELTKNQVSLTCLVKGFYPSDIAVEWESNGQPENNYKTTPPVLDSDGSFFLYSKLTVDKSRWQQGNVFSCSVMHEALHNHYTQKSLSLSPGKGSQVQLVESGGGLVQAGGSLRLSCAASGYAYTYIYMGWFRQAPGKEREGVAAMDSGGGGTLYADSVKGRFTISRDKGKNTVYLQMDSLKPEDTATYYCAAGGYELRDRTYGQWGQGTQVTVSS

SEQ ID NO: 131 - protein, 566 aa, Artificial Sequence
  Humanised
QVTLRESGPALVKPTQTLTLTCTFSGFSLSTSGMGVSWIRQPPGKGLEWLAHIYWDDDKRYNPSLKSRLTISKDTSRNQVVLTMTNMDPVDTATYYCARRETVFYWYFDVWGRGTLVTVSSASTKGPSVFPLAPSSKSTSGGTAALGCLVKDYFPEPVTVSWNSGALTSGVHTFPAVLQSSGLYSLSSVVTVPSSSLGTQTYICNVNHKPSNTKVDKKVEPKSCDKTHTCPPCPAPELLGGPSVFLFPPKPKDTLMISRTPEVTCVVVDVSHEDPEVKFNWYVDGVEVHNAKTKPREEQYNSTYRVVSVLTVLHQDWLNGKEYKCKVSNKALPAPIEKTISKAKGQPREPQVYTLPPSRDELTKNQVSLTCLVKGFYPSDIAVEWESNGQPENNYKTTPPVLDSDGSFFLYSKLTVDKSRWQQGNVFSCSVMHEALHNHYTQKSLSLSPGKGSARVDQTPRSVTKETGESLTINCVLRDASYALGSTCWYRKKSGEGNEESISKGGRYVETVNSGSKSFSLRINDLTVEDGGTYRCGLGVAGGYCDYALCSSRYAECGDGTAVTVN

SEQ ID NO: 132 - protein, 1659 aa, Artificial Sequence
  Humanised
CAGGTGACCCTGAGGGAGAGCGGCCCCGCCCTGGTGAAGCCCACCCAGACCCTGACCCTGACCTGCACCTTCAGCGGCTTTAGCCTCAGCACCTCCGGCATGGGCGTGAGCTGGATCAGGCAGCCACCCGGCAAAGGCCTGGAGTGGCTGGCCCACATCTACTGGGACGACGACAAGAGGTACAACCCCAGCCTGAAGAGCCGGCTGACCATCAGCAAGGATACCAGCAGGAACCAGGTGGTGCTGACCATGACCAACATGGACCCCGTGGACACCGCTACCTACTACTGCGCCAGGAGGGAGACCGTCTTCTACTGGTACTTCGACGTGTGGGGAAGGGGCACACTAGTGACCGTGTCCAGCGCCAGCACCAAGGGCCCCAGCGTGTTCCCCCTGGCCCCCAGCAGCAAGAGCACCAGCGGCGGCACAGCCGCCCTGGGCTGCCTGGTGAAGGACTACTTCCCCGAACCGGTGACCGTGTCCTGGAACAGCGGAGCCCTGACCAGCGGCGTGCACACCTTCCCCGCCGTGCTGCAGAGCAGCGGCCTGTACAGCCTGAGCAGCGTGGTGACCGTGCCCAGCAGCAGCCTGGGCACCCAGACCTACATCTGTAACGTGAACCACAAGCCCAGCAACACCAAGGTGGACAAGAAGGTGGAGCCCAAGAGCTGTGACAAGACCCACACCTGCCCCCCCTGCCCTGCCCCCGAGCTGCTGGGAGGCCCCAGCGTGTTCCTGTTCCCCCCCAAGCCTAAGGACACCCTGATGATCAGCAGAACCCCCGAGGTGACCTGTGTGGTGGTGGATGTGAGCCACGAGGACCCTGAGGTGAAGTTCAACTGGTACGTGGACGGCGTGGAGGTGCACAATGCCAAGACCAAGCCCAGGGAGGAGCAGTACAACAGCACCTACCGGGTGGTGTCCGTGCTGACCGTGCTGCACCAGGATTGGCTGAACGGCAAGGAGTACAAGTGTAAGGTGTCCAACAAGGCCCTGCCTGCCCCTATCGAGAAAACCATCAGCAAGGCCAAGGGCCAGCCCAGAGAGCCCCAGGTGTACACCCTGCCCCCTAGCAGAGATGAGCTGACCAAGAACCAGGTGTCCCTGACCTGCCTGGTGAAGGGCTTCTACCCCAGCGACATCGCCGTGGAGTGGGAGAGCAACGGCCAGCCCGAGAACAACTACAAGACCACCCCCCCTGTGCTGGACAGCGATGGCAGCTTCTTCCTGTACAGCAAGCTGACCGTGGACAAGAGCAGATGGCAGCAGGGCAACGTGTTCAGCTGCTCCGTGATGCACGAGGCCCTGCACAATCACTACACCCAGAAGAGCCTGAGCCTGTCCCCTGGCAAGACCGTGGCCGCCCCCTCGGGATCCGTGAGCGACGTGCCAAGGGACCTCGAGGTGGTGGCAGCCACTCCCACCTCTCTGCTGATCAGCTGGGACACACACAACGCCTACAACGGCTACTACAGGATCACCTACGGAGAGACCGGCGGCAATAGCCCCGTGAGGGAGTTCACCGTGCCCCACCCCGAGGTGACCGCCACCATTAGCGGCCTGAAGCCCGGCGTGGACGATACCATCACCGTCTACGCCGTGACCAACCACCACATGCCCCTGAGGATCTTCGGCCCCATCAGCATCAACCATAGGACC

SEQ ID NO: 133 - protein, 547 aa, Artificial Sequence [sequence omitted]

SEQ ID NO: 134 - protein, 551 aa, Artificial Sequence
  Humanised
QVQLVQSGAEVKKPGSSVKVSCKASGFYIKDTYMHWVRQAPGQGLEWMGTIDPANGNTKYVPKFQGRVTITADESTSTAYMELSSLRSEDTAVYYCARSIYDDYHYDDYYAMDYWGQGTLVTVSSASTKGPSVFPLAPSSKSTSGGTAALGCLVKDYFPEPVTVSWNSGALTSGVHTFPAVLQSSGLYSLSSVVTVPSSSLGTQTYICNVNHKPSNTKVDKKVEPKSCDKTHTCPPCPAPELLGGPSVFLFPPKPKDTLMISRTPEVTCVVVDVSHEDPEVKFNWYVDGVEVHNAKTKPREEQYNSTYRVVSVLTVLHQDWLNGKEYKCKVSNKALPAPIEKTISKAKGQPREPQVYTLPPSRDELTKNQVSLTCLVKGFYPSDIAVEWESNGQPENNYKTTPPVLDSDGSFFLYSKLTVDKSRWQQGNVFSCSVMHEALHNHYTQKSLSLSPGKGSVSDVPRDLEVVAATPTSLLISWDTHNAYNGYYRITYGETGGNSPVREFTVPHPEVTATISGLKPGVDDTITVYAVTNHHMPLRIFGPISINHRT

SEQ ID NO: 135 - protein, 557 aa, Artificial Sequence
  Humanised
QVQLVQSGAEVKKPGSSVKVSCKASGFYIKDTYMHWVRQAPGQGLEWMGTIDPANGNTKYVPKFQGRVTITADESTSTAYMELSSLRSEDTAVYYCARSIYDDYHYDDYYAMDYWGQGTLVTVSSASTKGPSVFPLAPSSKSTSGGTAALGCLVKDYFPEPVTVSWNSGALTSGVHTFPAVLQSSGLYSLSSVVTVPSSSLGTQTYICNVNHKPSNTKVDKKVEPKSCDKTHTCPPCPAPELLGGPSVFLFPPKPKDTLMISRTPEVTCVVVDVSHEDPEVKFNWYVDGVEVHNAKTKPREEQYNSTYRVVSVLTVLHQDWLNGKEYKCKVSNKALPAPIEKTISKAKGQPREPQVYTLPPSRDELTKNQVSLTCLVKGFYPSDIAVEWESNGQPENNYKTTPPVLDSDGSFFLYSKLTVDKSRWQQGNVFSCSVMHEALHNHYTQKSLSLSPGKTVAAPSGSVSDVPRDLEVVAATPTSLLISWDTHNAYNGYYRITYGETGGNSPVREFTVPHPEVTATISGLKPGVDDTITVYAVTNHHMPLRIFGPISINHRT

SEQ ID NO: 136 - protein, 537 aa, Artificial Sequence
  Humanised
QVQLKQSGPGLVQPSQSLSITCTVSGFSLTNYGVHWVRQSPGKGLEWLGVIWSGGNTDYNTPFTSRLSINKDNSKSQVFFKMNSLQSNDTAIYYCARALTYYDYEFAYWGQGTLVTVSAASTKGPSVFPLAPSSKSTSGGTAALGCLVKDYFPEPVTVSWNSGALTSGVHTFPAVLQSSGLYSLSSVVTVPSSSLGTQTYICNVNHKPSNTKVDKKVEPKSCDKTHTCPPCPAPELLGGPSVFLFPPKPKDTLMISRTPEVTCVVVDVSHEDPEVKFNWYVDGVEVHNAKTKPREEQYNSTYRVVSVLTVLHQDWLNGKEYKCKVSNKALPAPIEKTISKAKGQPREPQVYTLPPSRDELTKNQVSLTCLVKGFYPSDIAVEWESNGQPENNYKTTPPVLDSDGSFFLYSKLTVDKSRWQQGNVFSCSVMHEALHNHYTQKSLSLSPGKRSEVVAATPTSLLISWRHPHFPTRYYRITYGETGGNSPVQEFTVPLQPPTATISGLKPGVDYTITVYAVTDGRNGRLLSIPISINYRT

SEQ ID NO: 137 - protein, 214 aa, Artificial Sequence
  Humanised
DILLTQSPVILSVSPGERVSFSCRASQSIGTNIHWYQQRTNGSPRLLIKYASESISGIPSRFSGSGSGTDFTLSINSVESEDIADYYCQQNNNWPTTFGAGTKLELKRTVAAPSVFIFPPSDEQLKSGTASVVCLLNNFYPREAKVQWKVDNALQSGNSQESVTEQDSKDSTYSLSSTLTLSKADYEKHKVYACEVTHQGLSSPVTKSFNRGEC

SEQ ID NO: 138 - protein, 302 aa, Artificial Sequence
  Humanised
DILLTQSPVILSVSPGERVSFSCRASQSIGTNIHWYQQRTNGSPRLLIKYASESISGIPSRFSGSGSGTDFTLSINSVESEDIADYYCQQNNNWPTTFGAGTKLELKRTVAAPSVFIFPPSDEQLKSGTASVVCLLNNFYPREAKVQWKVDNALQSGNSQESVTEQDSKDSTYSLSSTLTLSKADYEKHKVYACEVTHQGLSSPVTKSFNRGECRSEVVAATPTSLLISWRHPHFPTRYYRITYGETGGNSPVQEFTVPLQPPTATISGLKPGVDYTITVYAVTDGRNGRLLSIPISINYRT

SEQ ID NO: 139 - protein, 449 aa, Artificial Sequence
  Humanised
QVQLKQSGPGLVQPSQSLSITCTVSGFSLTNYGVHWVRQSPGKGLEWLGVIWSGGNTDYNTPFTSRLSINKDNSKSQVFFKMNSLQSNDTAIYYCARALTYYDYEFAYWGQGTLVTVSAASTKGPSVFPLAPSSKSTSGGTAALGCLVKDYFPEPVTVSWNSGALTSGVHTFPAVLQSSGLYSLSSVVTVPSSSLGTQTYICNVNHKPSNTKVDKKVEPKSCDKTHTCPPCPAPELLGGPSVFLFPPKPKDTLMISRTPEVTCVVVDVSHEDPEVKFNWYVDGVEVHNAKTKPREEQYNSTYRVVSVLTVLHQDWLNGKEYKCKVSNKALPAPIEKTISKAKGQPREPQVYTLPPSRDELTKNQVSLTCLVKGFYPSDIAVEWESNGQPENNYKTTPPVLDSDGSFFLYSKLTVDKSRWQQGNVFSCSVMHEALHNHYTQKSLSLSPGK

SEQ ID NO: 140 - protein, 539 aa, Artificial Sequence
  Humanised
QVQLQESGPGLVKPSQTLSLTCTVSGGSISSGDYYWSWIRQPPGKGLEWIGYIYYSGSTDYNPSLKSRVTMSVDTSKNQFSLKVNSVTAADTAVYYCARVSIFGVGTFDYWGQGTLVTVSSASTKGPSVFPLAPSSKSTSGGTAALGCLVKDYFPEPVTVSWNSGALTSGVHTFPAVLQSSGLYSLSSVVTVPSSSLGTQTYICNVNHKPSNTKVDKKVEPKSCDKTHTCPPCPAPELLGGPSVFLFPPKPKDTLMISRTPEVTCVVVDVSHEDPEVKFNWYVDGVEVHNAKTKPREEQYNSTYRVVSVLTVLHQDWLNGKEYKCKVSNKALPAPIEKTISKAKGQPREPQVYTLPPSRDELTKNQVSLTCLVKGFYPSDIAVEWESNGQPENNYKTTPPVLDSDGSFFLYSKLTVDKSRWQQGNVFSCSVMHEALHNHYTQKSLSLSPGKGSEVVAATPTSLLISWRHPHFPTRYYRITYGETGGNSPVQEFTVPLQPPTATISGLKPGVDYTITVYAVTDGRNGRLLSIPISINYRT

SEQ ID NO: 141 - protein, 214 aa, Artificial Sequence
  Humanised
EIVMTQSPATLSLSPGERATLSCRASQSVSSYLAWYQQKPGQAPRLLIYDASNRATGIPARFSGSGSGTDFTLTISSLEPEDFAVYYCHQYGSTPLTFGGGTKAEIKRTVAAPSVFIFPPSDEQLKSGTASVVCLLNNFYPREAKVQWKVDNALQSGNSQESVTEQDSKDSTYSLSSTLTLSKADYEKHKVYACEVTHQGLSSPVTKSFNRGEC

SEQ ID NO: 142 - protein, 302 aa, Artificial Sequence [sequence omitted]

SEQ ID NO: 143 - protein, 451 aa, Artificial Sequence
  Humanised
QVQLQESGPGLVKPSQTLSLTCTVSGGSISSGDYYWSWIRQPPGKGLEWIGYIYYSGSTDYNPSLKSRVTMSVDTSKNQFSLKVNSVTAADTAVYYCARVSIFGVGTFDYWGQGTLVTVSSASTKGPSVFPLAPSSKSTSGGTAALGCLVKDYFPEPVTVSWNSGALTSGVHTFPAVLQSSGLYSLSSVVTVPSSSLGTQTYICNVNHKPSNTKVDKKVEPKSCDKTHTCPPCPAPELLGGPSVFLFPPKPKDTLMISRTPEVTCVVVDVSHEDPEVKFNWYVDGVEVHNAKTKPREEQYNSTYRVVSVLTVLHQDWLNGKEYKCKVSNKALPAPIEKTISKAKGQPREPQVYTLPPSRDELTKNQVSLTCLVKGFYPSDIAVEWESNGQPENNYKTTPPVLDSDGSFFLYSKLTVDKSRWQQGNVFSCSVMHEALHNHYTQKSLSLSPGK

SEQ ID NO: 144 - protein, 539 aa, Artificial Sequence
  Humanised
EVVAATPTSLLISWRHPHFPTRYYRITYGETGGNSPVQEFTVPLQPPTATISGLKPGVDYTITVYAVTDGRNGRLLSIPISINYRTGSTGQVQLKQSGPGLVQPSQSLSITCTVSGFSLTNYGVHWVRQSPGKGLEWLGVIWSGGNTDYNTPFTSRLSINKDNSKSQVFFKMNSLQSNDTAIYYCARALTYYDYEFAYWGQGTLVTVSAASTKGPSVFPLAPSSKSTSGGTAALGCLVKDYFPEPVTVSWNSGALTSGVHTFPAVLQSSGLYSLSSVVTVPSSSLGTQTYICNVNHKPSNTKVDKKVEPKSCDKTHTCPPCPAPELLGGPSVFLFPPKPKDTLMISRTPEVTCVVVDVSHEDPEVKFNWYVDGVEVHNAKTKPREEQYNSTYRVVSVLTVLHQDWLNGKEYKCKVSNKALPAPIEKTISKAKGQPREPQVYTLPPSRDELTKNQVSLTCLVKGFYPSDIAVEWESNGQPENNYKTTPPVLDSDGSFFLYSKLTVDKSRWQQGNVFSCSVMHEALHNHYTQKSLSLSPGK

SEQ ID NO: 145 - protein, 303 aa, Artificial Sequence
  Humanised
EVVAATPTSLLISWRHPHFPTRYYRITYGETGGNSPVQEFTVPLQPPTATISGLKPGVDYTITVYAVTDGRNGRLLSIPISINYRTSTGDILLTQSPVILSVSPGERVSFSCRASQSIGTNIHWYQQRTNGSPRLLIKYASESISGIPSRFSGSGSGTDFTLSINSVESEDIADYYCQQNNNWPTTFGAGTKLELKRTVAAPSVFIFPPSDEQLKSGTASVVCLLNNFYPREAKVQWKVDNALQSGNSQESVTEQDSKDSTYSLSSTLTLSKADYEKHKVYACEVTHQGLSSPVTKSFNRGEC

SEQ ID NO: 146 - protein, 547 aa, Artificial Sequence
  Humanised
QVTLRESGPALVKPTQTLTLTCTFSGFSLSTSGMGVSWIRQPPGKGLEWLAHIYWDDDKRYNPSLKSRLTISKDTSRNQVVLTMTNMDPVDTATYYCARRETVFYWYFDVWGRGTLVTVSSASTKGPSVFPLAPSSKSTSGGTAALGCLVKDYFPEPVTVSWNSGALTSGVHTFPAVLQSSGLYSLSSVVTVPSSSLGTQTYICNVNHKPSNTKVDKKVEPKSCDKTHTCPPCPAPELLGGPSVFLFPPKPKDTLMISRTPEVTCVVVDVSHEDPEVKFNWYVDGVEVHNAKTKPREEQYNSTYRVVSVLTVLHQDWLNGKEYKCKVSNKALPAPIEKTISKAKGQPREPQVYTLPPSRDELTKNQVSLTCLVKGFYPSDIAVEWESNGQPENNYKTTPPVLDSDGSFFLYSKLTVDKSRWQQGNVFSCSVMHEALHNHYTQKSLSLSPGKGSVSDVPRDLEVVAATPTSLLISWDTHNAYNGYYRITYGETGGNSPVREFTVPHPEVTATISGLKPGVDDTITVYAVTNHHMPLRIFGPISINHRT

SEQ ID NO: 147 - protein, 553 aa, Artificial Sequence
  Humanised
QVTLRESGPALVKPTQTLTLTCTFSGFSLSTSGMGVSWIRQPPGKGLEWLAHIYWDDDKRYNPSLKSRLTISKDTSRNQVVLTMTNMDPVDTATYYCARRETVFYWYFDVWGRGTLVTVSSASTKGPSVFPLAPSSKSTSGGTAALGCLVKDYFPEPVTVSWNSGALTSGVHTFPAVLQSSGLYSLSSVVTVPSSSLGTQTYICNVNHKPSNTKVDKKVEPKSCDKTHTCPPCPAPELLGGPSVFLFPPKPKDTLMISRTPEVTCVVVDVSHEDPEVKFNWYVDGVEVHNAKTKPREEQYNSTYRVVSVLTVLHQDWLNGKEYKCKVSNKALPAPIEKTISKAKGQPREPQVYTLPPSRDELTKNQVSLTCLVKGFYPSDIAVEWESNGQPENNYKTTPPVLDSDGSFFLYSKLTVDKSRWQQGNVFSCSVMHEALHNHYTQKSLSLSPGKTVAAPSGSVSDVPRDLEVVAATPTSLLISWDTHNAYNGYYRITYGETGGNSPVREFTVPHPEVTATISGLKPGVDDTITVYAVTNHHMPLRIFGPISINHRT

SEQ ID NO: 148 - protein, 118 aa, Homo Sapiens
GVQLLESGGGLVQPGGSLRLSCAASGFVFPWYDMGWVRQAPGKGLEWVSSIDWHGKITYYADSVKGRFTISRDNSKNTLYLQMNSLRAEDTAVYYCATAEDEPGYDYWGQGTLVTVSS

SEQ ID NO: 149 - protein, 569 aa, Artificial Sequence
  Humanised
QVTLRESGPALVKPTQTLTLTCTFSGFSLSTSGMGVSWIRQPPGKGLEWLAHIYWDDDKRYNPSLKSRLTISKDTSRNQVVLTMTNMDPVDTATYYCARRETVFYWYFDVWGRGTLVTVSSASTKGPSVFPLAPSSKSTSGGTAALGCLVKDYFPEPVTVSWNSGALTSGVHTFPAVLQSSGLYSLSSVVTVPSSSLGTQTYICNVNHKPSNTKVDKKVEPKSCDKTHTCPPCPAPELLGGPSVFLFPPKPKDTLMISRTPEVTCVVVDVSHEDPEVKFNWYVDGVEVHNAKTKPREEQYNSTYRVVSVLTVLHQDWLNGKEYKCKVSNKALPAPIEKTISKAKGQPREPQVYTLPPSRDELTKNQVSLTCLVKGFYPSDIAVEWESNGQPENNYKTTPPVLDSDGSFFLYSKLTVDKSRWQQGNVFSCSVMHEALHNHYTQKSLSLSPGKGVQLLESGGGLVQPGGSLRLSCAASGFVFPWYDMGWVRQAPGKGLEWVSSIDWHGKITYYADSVKGRFTISRDNSKNTLYLQMNSLRAEDTAVYYCATAEDEPGYDYWGQGTLVTVSS

SEQ ID NO: 150 - protein, 575 aa, Artificial Sequence
  Humanised
QVTLRESGPALVKPTQTLTLTCTFSGFSLSTSGMGVSWIRQPPGKGLEWLAHIYWDDDKRYNPSLKSRLTISKDTSRNQVVLTMTNMDPVDTATYYCARRETVFYWYFDVWGRGTLVTVSSASTKGPSVFPLAPSSKSTSGGTAALGCLVKDYFPEPVTVSWNSGALTSGVHTFPAVLQSSGLYSLSSVVTVPSSSLGTQTYICNVNHKPSNTKVDKKVEPKSCDKTHTCPPCPAPELLGGPSVFLFPPKPKDTLMISRTPEVTCVVVDVSHEDPEVKFNWYVDGVEVHNAKTKPREEQYNSTYRVVSVLTVLHQDWLNGKEYKCKVSNKALPAPIEKTISKAKGQPREPQVYTLPPSRDELTKNQVSLTCLVKGFYPSDIAVEWESNGQPENNYKTTPPVLDSDGSFFLYSKLTVDKSRWQQGNVFSCSVMHEALHNHYTQKSLSLSPGKTVAAPSGVQLLESGGGLVQPGGSLRLSCAASGFVFPWYDMGWVRQAPGKGLEWVSSIDWHGKITYYADSVKGRFTISRDNSKNTLYLQMNSLRAEDTAVYYCATAEDEPGYDYWGQGTLVTVSS

SEQ ID NO: 151 - protein, 579 aa, Artificial Sequence
  Humanised
QVQLVQSGAEVKKPGASVKVSCKASGFYIKDTYMHWVRQAPGQGLEWMGTIDPANGNTKYVPKFQGRVTMTTDTSTSTAYMELRSLRSDDTAVYYCARSIYDDYHYDDYYAMDYWGQGTLVTVSSASTKGPSVFPLAPSSKSTSGGTAALGCLVKDYFPEPVTVSWNSGALTSGVHTFPAVLQSSGLYSLSSVVTVPSSSLGTQTYICNVNHKPSNTKVDKKVEPKSCDKTHTCPPCPAPELLGGPSVFLFPPKPKDTLMISRTPEVTCVVVDVSHEDPEVKFNWYVDGVEVHNAKTKPREEQYNSTYRVVSVLTVLHQDWLNGKEYKCKVSNKALPAPIEKTISKAKGQPREPQVYTLPPSRDELTKNQVSLTCLVKGFYPSDIAVEWESNGQPENNYKTTPPVLDSDGSFFLYSKLTVDKSRWQQGNVFSCSVMHEALHNHYTQKSLSLSPGKTVAAPSGSEVQLLESGGGLVQPGGSLRLSCAASGFTFRNFGMGWVRQAPGKGLEWVSWIISSGTETYYADSVKGRFTISRDNSKNTLYLQMNSLRAEDTAVYYCAKSLGRFDYWGQGTLVTVSS

SEQ ID NO: 152 - protein, 579 aa, Artificial Sequence
  Humanised
EVQLVQSGAEVKKPGESLKISCKGSGFYIKDTYMHWVRQMPGKGLEWMGTIDPANGNTKYVPKFQGQVTISADKSISTAYLQWSSLKASDTAMYYCARSIYDDYHYDDYYAMDYWGQGTLVTVSSASTKGPSVFPLAPSSKSTSGGTAALGCLVKDYFPEPVTVSWNSGALTSGVHTFPAVLQSSGLYSLSSVVTVPSSSLGTQTYICNVNHKPSNTKVDKKVEPKSCDKTHTCPPCPAPELLGGPSVFLFPPKPKDTLMISRTPEVTCVVVDVSHEDPEVKFNWYVDGVEVHNAKTKPREEQYNSTYRVVSVLTVLHQDWLNGKEYKCKVSNKALPAPIEKTISKAKGQPREPQVYTLPPSRDELTKNQVSLTCLVKGFYPSDIAVEWESNGQPENNYKTTPPVLDSDGSFFLYSKLTVDKSRWQQGNVFSCSVMHEALHNHYTQKSLSLSPGKTVAAPSGSEVQLLESGGGLVQPGGSLRLSCAASGFTFRNFGMGWVRQAPGKGLEWVSWIISSGTETYYADSVKGRFTISRDNSKNTLYLQMNSLRAEDTAVYYCAKSLGRFDYWGQGTLVTVSS

SEQ ID NO: 153 - protein, 219 aa, Artificial Sequence
  Humanised
EIVLTQSPATLSLSPGERATLSCRSSQNIVHINGNTYLEWYQQKPGQAPRLLIYKISDRFSGIPARFSGSGSGTDFTLTISSLEPEDFAVYYCFQGSHVPWTFGGGTKVEIKRTVAAPSVFIFPPSDEQLKSGTASVVCLLNNFYPREAKVQWKVDNALQSGNSQESVTEQDSKDSTYSLSSTLTLSKADYEKHKVYACEVTHQGLSSPVTKSFNRGEC

SEQ ID NO: 154 - protein, 219 aa, Artificial Sequence; identical to SEQ ID NO: 153
  Humanised

SEQ ID NO: 155 - protein, 571 aa, Artificial Sequence
  Humanised
QVQLVQSGAEVKKPGASVKVSCKASGYTFIDYEIHWVRQAPGQGLEWMGAIDPETGGTAYNQKFKGRVTMTTDTSTSTAYMELRSLRSDDTAVYYCTRILLYYYPMDYWGQGTLVTVSSASTKGPSVFPLAPSSKSTSGGTAALGCLVKDYFPEPVTVSWNSGALTSGVHTFPAVLQSSGLYSLSSVVTVPSSSLGTQTYICNVNHKPSNTKVDKKVEPKSCDKTHTCPPCPAPELLGGPSVFLFPPKPKDTLMISRTPEVTCVVVDVSHEDPEVKFNWYVDGVEVHNAKTKPREEQYNSTYRVVSVLTVLHQDWLNGKEYKCKVSNKALPAPIEKTISKAKGQPREPQVYTLPPSRDELTKNQVSLTCLVKGFYPSDIAVEWESNGQPENNYKTTPPVLDSDGSFFLYSKLTVDKSRWQQGNVFSCSVMHEALHNHYTQKSLSLSPGKTVAAPSEVQLLESGGGLVQPGGSLRLSCAASGFTFRNFGMGWVRQAPGKGLEWVSWIISSGTETYYADSVKGRFTISRDNSKNTLYLQMNSLRAEDTAVYYCAKSLGRFDYWGQGTLVTVSS

SEQ ID NO: 156 - protein, 214 aa, Artificial Sequence
  Humanised
EIVLTQSPATLSLSPGERATLSCRASQNISDYLHWYQQKPGQAPRLLIYYASQSISGIPARFSGSGSGTDFTLTISSLEPEDFAVYYCQNGHSFPLTFGGGTKVEIKRTVAAPSVFIFPPSDEQLKSGTASVVCLLNNFYPREAKVQWKVDNALQSGNSQESVTEQDSKDSTYSLSSTLTLSKADYEKHKVYACEVTHQGLSSPVTKSFNRGEC

SEQ ID NO: 157 - protein, 575 aa, Artificial Sequence
  Humanised
QVTLRESGPALVKPTQTLTLTCTFSGFSLSTSGMGVSWIRQPPGKGLEWLAHIYWDDDKRYNPSLKSRLTISKDTSRNQVVLTMTNMDPVDTATYYCARRETVFYWYFDVWGRGTLVTVSSASTKGPSVFPLAPSSKSTSGGTAALGCLVKDYFPEPVTVSWNSGALTSGVHTFPAVLQSSGLYSLSSVVTVPSSSLGTQTYICNVNHKPSNTKVDKKVEPKSCDKTHTCPPCPAPELLGGPSVFLFPPKPKDTLMISRTPEVTCVVVDVSHEDPEVKFNWYVDGVEVHNAKTKPREEQYNSTYRVVSVLTVLHQDWLNGKEYKCKVSNKALPAPIEKTISKAKGQPREPQVYTLPPSRDELTKNQVSLTCLVKGFYPSDIAVEWESNGQPENNYKTTPPVLDSDGSFFLYSKLTVDKSRWQQGNVFSCSVMHEALHNHYTQKSLSLSPGKTVAAPSGVQLLESGGGLVQPGGSLRLSCAASGFVFPWYDMGWVRQAPGKGLEWVSSIDWKGGKTYYADSVKGRFTISRDNSKNTLYLQMNSLRAEDTAVYYCATAEDEPGYDYWGQGTLVTVSS

SEQ ID NO: 158 - protein, 569 aa, Artificial Sequence
  Humanised
QVTLRESGPALVKPTQTLTLTCTFSGFSLSTSGMGVSWIRQPPGKGLEWLAHIYWDDDKRYNPSLKSRLTISKDTSRNQVVLTMTNMDPVDTATYYCARRETVFYWYFDVWGRGTLVTVSSASTKGPSVFPLAPSSKSTSGGTAALGCLVKDYFPEPVTVSWNSGALTSGVHTFPAVLQSSGLYSLSSVVTVPSSSLGTQTYICNVNHKPSNTKVDKKVEPKSCDKTHTCPPCPAPELLGGPSVFLFPPKPKDTLMISRTPEVTCVVVDVSHEDPEVKFNWYVDGVEVHNAKTKPREEQYNSTYRVVSVLTVLHQDWLNGKEYKCKVSNKALPAPIEKTISKAKGQPREPQVYTLPPSRDELTKNQVSLTCLVKGFYPSDIAVEWESNGQPENNYKTTPPVLDSDGSFFLYSKLTVDKSRWQQGNVFSCSVMHEALHNHYTQKSLSLSPGKGVQLLESGGGLVQPGGSLRLSCAASGFVFPWYDMGWVRQAPGKGLEWVSSIDWKGGKTYYADSVKGRFTISRDNSKNTLYLQMNSLRAEDTAVYYCATAEDEPGYDYWGQGTLVTVSS

SEQ ID NO: 159 - protein, 575 aa, Artificial Sequence
  Humanised
QVTLRESGPALVKPTQTLTLTCTFSGFSLSTSGMGVSWIRQPPGKGLEWLAHIYWDDDKRYNPSLKSRLTISKDTSRNQVVLTMTNMDPVDTATYYCARRETVFYWYFDVWGRGTLVTVSSASTKGPSVFPLAPSSKSTSGGTAALGCLVKDYFPEPVTVSWNSGALTSGVHTFPAVLQSSGLYSLSSVVTVPSSSLGTQTYICNVNHKPSNTKVDKKVEPKSCDKTHTCPPCPAPELLGGPSVFLFPPKPKDTLMISRTPEVTCVVVDVSHEDPEVKFNWYVDGVEVHNAKTKPREEQYNSTYRVVSVLTVLHQDWLNGKEYKCKVSNKALPAPIEKTISKAKGQPREPQVYTLPPSRDELTKNQVSLTCLVKGFYPSDIAVEWESNGQPENNYKTTPPVLDSDGSFFLYSKLTVDKSRWQQGNVFSCSVMHEALHNHYTQKSLSLSPGKTVAAPSGVQLLESGGGLVQPGGSLRLSCAASGFVFAWYDMGWVRQAPGKGLEWVSSIDWHGEVTYYADSVKGRFTISRDNSKNTLYLQMNSLRAEDTAVYYCATAEDEPGYDYWGQGTLVTVSS

SEQ ID NO: 160 - protein, 569 aa, Artificial Sequence
  Humanised
QVTLRESGPALVKPTQTLTLTCTFSGFSLSTSGMGVSWIRQPPGKGLEWLAHIYWDDDKRYNPSLKSRLTISKDTSRNQVVLTMTNMDPVDTATYYCARRETVFYWYFDVWGRGTLVTVSSASTKGPSVFPLAPSSKSTSGGTAALGCLVKDYFPEPVTVSWNSGALTSGVHTFPAVLQSSGLYSLSSVVTVPSSSLGTQTYICNVNHKPSNTKVDKKVEPKSCDKTHTCPPCPAPELLGGPSVFLFPPKPKDTLMISRTPEVTCVVVDVSHEDPEVKFNWYVDGVEVHNAKTKPREEQYNSTYRVVSVLTVLHQDWLNGKEYKCKVSNKALPAPIEKTISKAKGQPREPQVYTLPPSRDELTKNQVSLTCLVKGFYPSDIAVEWESNGQPENNYKTTPPVLDSDGSFFLYSKLTVDKSRWQQGNVFSCSVMHEALHNHYTQKSLSLSPGKGVQLLESGGGLVQPGGSLRLSCAASGFVFAWYDMGWVRQAPGKGLEWVSSIDWHGEVTYYADSVKGRFTISRDNSKNTLYLQMNSLRAEDTAVYYCATAEDEPGYDYWGQGTLVTVSS

SEQ ID NO: 161 - protein, 449 aa, Artificial Sequence
  Humanised
QVQLVQSGAEVKKPGASVKVSCKASGYTFIDYEIHWVRQAPGQGLEWMGAIDPETGGTAYNQKFKGRVTMTTDTSTSTAYMELRSLRSDDTAVYYCTRILLYYYPMDYWGQGTLVTVSSASTKGPSVFPLAPSSKSTSGGTAALGCLVKDYFPEPVTVSWNSGALTSGVHTFPAVLQSSGLYSLSSVVTVPSSSLGTQTYICNVNHKPSNTKVDKKVEPKSCDKTHTCPPCPAPELLGGPSVFLFPPKPKDTLMISRTPEVTCVVVDVSHEDPEVKFNWYVDGVEVHNAKTKPREEQYNSTYRVVSVLTVLHQDWLNGKEYKCKVSNKALPAPIEKTISKAKGQPREPQVYTLPPSRDELTKNQVSLTCLVKGFYPSDIAVEWESNGQPENNYKTTPPVLDSDGSFFLYSKLTVDKSRWQQGNVFSCSVMHEALHNHYTQKSLSLSPGK

SEQ ID NO: 162 - DNA, 1707 bp, Artificial Sequence
  Humanised
gaggtgcagctgttggagtctgggggaggcttggtacagcctggggggtccctgcgtctctcctgtgcagcctccggattcacctttggggcttatccgatgatgtgggtccgccaggctccagggaagggtctagagtgggtctcagagatttcgccttcgggttcttatacatactacgcagactccgtgaagggccggttcaccatctcccgcgacaattccaagaacacgctgtatctgcaaatgaacagcctgcgtgccgaggacaccgcggtatattactgtgcgaaagatcctcggaagtttgactactggggtcagggaaccctggtcaccgtctcgagcgctagcaccaagggccccagcgaggtgcagctgttggagtctgggggaggcttggtacagcctggggggtccctgcgtctctcctgtgcagcctccggattcacctttagcagctatgccatgagctgggtccgccaggctccagggaagggtctagagtgggtctcagctattagtggtagtggtggtagcacatactacgcagactccgtgaagggccggttcaccatctcccgcgacaattccaagaacacgctgtatctgcaaatgaacagcctgcgtgccgaggacaccgcggtatattactgtgcgaaaagttatggtgcttttgactactggggccagggaaccctggtcaccgtctcgagcgctagcaccaagggccccagcgtgttccccctggcccccagcagcaagagcaccagcggcggcacagccgccctgggctgcctggtgaaggactacttccccgagcctgtgaccgtgtcctggaatagcggagccctgacctccggcgtgcacaccttccccgccgtgctgcagagcagcggcctgtactccctgagcagcgtggtgaccgtgcccagcagcagcctgggcacccagacctacatctgcaacgtgaaccacaagcccagcaacaccaaagtggacaagaaagtggagcccaagagctgcgataagacccacacctgccccccctgccctgcccccgagctgctgggcggacctagcgtgttcctgttcccccccaagcctaaggacaccctgatgatcagcaggacccccgaagtgacctgcgtggtggtggatgtgagccacgaggaccctgaagtgaagttcaactggtacgtggacggcgtggaagtgcacaacgccaagaccaagcccagagaggagcagtacaacagcacctaccgcgtggtgtctgtgctgaccgtgctgcaccaggattggctgaacggcaaggagtacaagtgcaaagtgagcaacaaggccctgcctgcccctatcgagaaaaccatcagcaaggccaagggccagcctagagagccccaggtctacaccctgcctccctccagagatgagctgaccaagaaccaggtgtccctgacctgtctggtgaagggcttctaccccagcgacatcgccgtggagtgggagagcaacggccagcccgagaacaactacaagaccaccccccctgtgctggacagcgatggcagcttcttcctgtactccaagctgaccgtggacaagagcagatggcagcagggcaacgtgttcagctgcagcgtgatgcacgaggccctgcacaatcactacacccagaagagtctgagcctgtcccctggcaag

SEQ ID NO: 163 - protein, 569 aa, Artificial Sequence
  Humanised
EVQLLESGGGLVQPGGSLRLSCAASGFTFGAYPMMWVRQAPGKGLEWVSEISPSGSYTYYADSVKGRFTISRDNSKNTLYLQMNSLRAEDTAVYYCAKDPRKFDYWGQGTLVTVSSASTKGPSEVQLLESGGGLVQPGGSLRLSCAASGFTFSSYAMSWVRQAPGKGLEWVSAISGSGGSTYYADSVKGRFTISRDNSKNTLYLQMNSLRAEDTAVYYCAKSYGAFDYWGQGTLVTVSSASTKGPSVFPLAPSSKSTSGGTAALGCLVKDYFPEPVTVSWNSGALTSGVHTFPAVLQSSGLYSLSSVVTVPSSSLGTQTYICNVNHKPSNTKVDKKVEPKSCDKTHTCPPCPAPELLGGPSVFLFPPKPKDTLMISRTPEVTCVVVDVSHEDPEVKFNWYVDGVEVHNAKTKPREEQYNSTYRVVSVLTVLHQDWLNGKEYKCKVSNKALPAPIEKTISKAKGQPREPQVYTLPPSRDELTKNQVSLTCLVKGFYPSDIAVEWESNGQPENNYKTTPPVLDSDGSFFLYSKLTVDKSRWQQGNVFSCSVMHEALHNHYTQKSLSLSPGK

SEQ ID NO: 164 - DNA, 1704 bp, Artificial Sequence
  Humanised
caggtgcagctgaagcagagcggccctggcctggtgcagccctctcagagcctgagcatcacctgtaccgtgagcggcttcagcctgaccaattacggcgtgcattgggtgcggcagtctccaggcaagggcctggaatggctgggagtgatctggtccggcggcaacaccgactacaacacccccttcaccagcagactgagcatcaacaaggacaacagcaagagccaggtgttcttcaagatgaacagcctgcagagcaacgacaccgccatctactattgtgccagggccctgacctactacgactacgagttcgcctactggggccagggcaccctggtgaccgtgagcgccgctagcaccaagggccccagcgtgttccccctggcccccagcagcaagagcaccagcggcggcacagccgccctgggctgcctggtgaaggactacttccccgagcctgtgaccgtgtcctggaatagcggagccctgacctccggcgtgcacaccttccccgccgtgctgcagagcagcggcctgtactccctgagcagcgtggtgaccgtgcccagcagcagcctgggcacccagacctacatctgcaacgtgaaccacaagcccagcaacaccaaagtggacaagaaagtggagcccaagagctgcgataagacccacacctgccccccctgccctgcccccgagctgctgggcggacctagcgtgttcctgttcccccccaagcctaaggacaccctgatgatcagcaggacccccgaagtgacctgcgtggtggtggatgtgagccacgaggaccctgaagtgaagttcaactggtacgtggacggcgtggaagtgcacaacgccaagaccaagcccagagaggagcagtacaacagcacctaccgcgtggtgtctgtgctgaccgtgctgcaccaggattggctgaacggcaaggagtacaagtgcaaagtgagcaacaaggccctgcctgcccctatcgagaaaaccatcagcaaggccaagggccagcctagagagccccaggtctacaccctgcctccctccagagatgagctgaccaagaaccaggtgtccctgacctgtctggtgaagggcttctaccccagcgacatcgccgtggagtgggagagcaacggccagcccgagaacaactacaagaccaccccccctgtgctggacagcgatggcagcttcttcctgtactccaagctgaccgtggacaagagcagatggcagcagggcaacgtgttcagctgcagcgtgatgcacgaggccctgcacaatcactacacccagaagagtctgagcctgtcccctggcaagtcgaccggtgaggtgcagctgttggtgtctgggggaggcttggtacagcctggggggtccctgcgtctctcctgtgcagcctccggattcacctttaaggcttatccgatgatgtgggtccgccaggctccagggaagggtctagagtgggtttcagagatttcgccttcgggttcttatacatactacgcagactccgtgaagggccggttcaccatctcccgcgacaattccaagaacacgctgtatctgcaaatgaacagcctgcgtgccgaggacaccgcggtatattactgtgcgaaagatcctcggaagttagactactggggtcagggaaccctggtcaccgtctcgagc

SEQ ID NO: 165 - protein, 568 aa, Artificial Sequence
  Humanised
QVQLKQSGPGLVQPSQSLSITCTVSGFSLTNYGVHWVRQSPGKGLEWLGVIWSGGNTDYNTPFTSRLSINKDNSKSQVFFKMNSLQSNDTAIYYCARALTYYDYEFAYWGQGTLVTVSAASTKGPSVFPLAPSSKSTSGGTAALGCLVKDYFPEPVTVSWNSGALTSGVHTFPAVLQSSGLYSLSSVVTVPSSSLGTQTYICNVNHKPSNTKVDKKVEPKSCDKTHTCPPCPAPELLGGPSVFLFPPKPKDTLMISRTPEVTCVVVDVSHEDPEVKFNWYVDGVEVHNAKTKPREEQYNSTYRVVSVLTVLHQDWLNGKEYKCKVSNKALPAPIEKTISKAKGQPREPQVYTLPPSRDELTKNQVSLTCLVKGFYPSDIAVEWESNGQPENNYKTTPPVLDSDGSFFLYSKLTVDKSRWQQGNVFSCSVMHEALHNHYTQKSLSLSPGKSTGEVQLLVSGGGLVQPGGSLRLSCAASGFTFKAYPMMWVRQAPGKGLEWVSEISPSGSYTYYADSVKGRFTISRDNSKNTLYLQMNSLRAEDTAVYYCAKDPRKLDYWGQGTLVTVSS

SEQ ID NO: 166 - protein, 451 aa, Artificial Sequence
  Humanised
QVTLRESGPALVKPTQTLTLTCTFSGFSLSTSGMGVSWIRQPPGKGLEWLAHIYWDDDKRYNPSLKSRLTISKDTSRNQVVLTMTNMDPVDTATYYCARRETVFYWYFDVWGRGTPVTVSSASTKGPSVFPLAPSSKSTSGGTAALGCLVKDYFPEPVTVSWNSGALTSGVHTFPAVLQSSGLYSLSSVVTVPSSSLGTQTYICNVNHKPSNTKVDKRVEPKSCDKTHTCPPCPAPELLGGPSVFLFPPKPKDTLMISRTPEVTCVVVDVSHEDPEVKFNWYVDGVEVHNAKTKPREEQYNSTYRVVSVLTVLHQDWLNGKEYKCKVSNKALPAPIEKTISKAKGQPREPQVYTLPPSREEMTKNQVSLTCLVKGFYPSDIAVEWESNGQPENNYKTTPPVLDSDGSFFLYSKLTVDKSRWQQGNVFSCSVMHEALHNHYTQKSLSLSPGK

SEQ ID NO: 167 - DNA, 1737 bp, Artificial Sequence
  Humanised
caggtgcagctcgtgcagagcggcgccgaagtgaaaaagcccggcagcagcgtgaaggtgagctgcaaggcctccggcttctacatcaaggacacctacatgcactgggtcaggcaggctcctggccagggcctggagtggatgggcactatcgaccccgccaacggcaacaccaagtacgtgcccaagttccagggcagggtgaccatcaccgccgatgagagcaccagcaccgcctacatggaactgagcagcctgaggtctgaggacaccgccgtgtactattgcgccaggagcatctacgacgactaccactacgacgactactacgccatggactactggggacagggcacactagtgaccgtgtccagcgccagcaccaagggccccagcgtgttccccctggcccccagcagcaagagcaccagcggcggcacagccgccctgggctgcctggtgaaggactacttccccgaaccggtgaccgtgtcctggaacagcggagccctgaccagcggcgtgcacaccttccccgccgtgctgcagagcagcggcctgtacagcctgagcagcgtggtgaccgtgcccagcagcagcctgggcacccagacctacatctgtaacgtgaaccacaagcccagcaacaccaaggtggacaagaaggtggagcccaagagctgtgacaagacccacacctgccccccctgccctgcccccgagctgctgggaggccccagcgtgttcctgttcccccccaagcctaaggacaccctgatgatcagcagaacccccgaggtgacctgtgtggtggtggatgtgagccacgaggaccctgaggtgaagttcaactggtacgtggacggcgtggaggtgcacaatgccaagaccaagcccagggaggagcagtacaacagcacctaccgggtggtgtccgtgctgaccgtgctgcaccaggattggctgaacggcaaggagtacaagtgtaaggtgtccaacaaggccctgcctgcccctatcgagaaaaccatcagcaaggccaagggccagcccagagagccccaggtgtacaccctgccccctagcagagatgagctgaccaagaaccaggtgtccctgacctgcctggtgaagggcttctaccccagcgacatcgccgtggagtgggagagcaacggccagcccgagaacaactacaagaccaccccccctgtgctggacagcgatggcagcttcttcctgtacagcaagctgaccgtggacaagagcagatggcagcagggcaacgtgttcagctgctccgtgatgcacgaggccctgcacaatcactacacccagaagagcctgagcctgtcccctggcaagaccgtggccgccccctcgggatccgaagtgcagctcctggagagcggcggcggcctggtgcagcccggcggcagcctgaggctgagctgcgccgctagcggcttcaccttcaggaacttcggcatgggctgggtcaggcaggcccccggcaagggcctggagtgggtcagctggatcatcagctccggcaccgagacctactacgccgacagcgtgaagggcaggttcaccatcagccgcgacaacagcaagaacaccctgtacctgcagatgaacagcctgagggccgaggacaccgccgtctactactgcgccaagagcctgggcaggttcgactactggggacaggggaccctggtgactgtgagcagc

SEQ ID NO: 168 - DNA, 1710 bp, Artificial Sequence
  Humanised
gaggtgcagctggtggagtctggcggcggactggtgcagcccggcagaagcctgagactgagctgtgccgccagcggcttcaccttcgacgactacgccatgcactgggtgaggcaggcccctggcaagggcctggagtgggtgtccgccatcacctggaatagcggccacatcgactacgccgacagcgtggagggcagattcaccatcagccgggacaacgccaagaacagcctgtacctgcagatgaacagcctgagagccgaggacaccgccgtgtactactgtgccaaggtgtcctacctgagcaccgccagcagcctggactactggggccagggcaccctggtgacagtctcgagcgctagcaccaagggccccagcgtgttccccctggcccccagcagcaagagcaccagcggcggcacagccgccctgggctgcctggtgaaggactacttccccgagcctgtgaccgtgtcctggaatagcggagccctgacctccggcgtgcacaccttccccgccgtgctgcagagcagcggcctgtactccctgagcagcgtggtgaccgtgcccagcagcagcctgggcacccagacctacatctgcaacgtgaaccacaagcccagcaacaccaaagtggacaagaaagtggagcccaagagctgcgataagacccacacctgccccccctgccctgcccccgagctgctgggcggacctagcgtgttcctgttcccccccaagcctaaggacaccctgatgatcagcaggacccccgaagtgacctgcgtggtggtggatgtgagccacgaggaccctgaagtgaagttcaactggtacgtggacggcgtggaagtgcacaacgccaagaccaagcccagagaggagcagtacaacagcacctaccgcgtggtgtctgtgctgaccgtgctgcaccaggattggctgaacggcaaggagtacaagtgcaaagtgagcaacaaggccctgcctgcccctatcgagaaaaccatcagcaaggccaagggccagcctagagagccccaggtctacaccctgcctccctccagagatgagctgaccaagaaccaggtgtccctgacctgtctggtgaagggcttctaccccagcgacatcgccgtggagtgggagagcaacggccagcccgagaacaactacaagaccaccccccctgtgctggacagcgatggcagcttcttcctgtactccaagctgaccgtggacaagagcagatggcagcagggcaacgtgttcagctgcagcgtgatgcacgaggccctgcacaatcactacacccagaagagtctgagcctgtcccctggcaagtcgaccggtgaggtgcagctgttggtgtctgggggaggcttggtacagcctggggggtccctgcgtctctcctgtgcagcctccggattcacctttaaggcttatccgatgatgtgggtccgccaggctccagggaagggtctagagtgggtttcagagatttcgccttcgggttcttatacatactacgcagactccgtgaagggccggttcaccatctcccgcgacaattccaagaacacgctgtatctgcaaatgaacagcctgcgtgccgaggacaccgcggtatattactgtgcgaaagatcctcggaagttagactactggggtcagggaaccctggtcaccgtctcgagc

SEQ ID NO: 169 - DNA, 642 bp, Artificial Sequence
  Humanised
gatatccagatgacccagagccccagcagcctgagcgcctctgtgggcgatagagtgaccatcacctgccgggccagccagggcatcagaaactacctggcctggtatcagcagaagcctggcaaggcccctaagctgctgatctacgccgccagcaccctgcagagcggcgtgcccagcagattcagcggcagcggctccggcaccgacttcaccctgaccatcagcagcctgcagcccgaggacgtggccacctactactgccagcggtacaacagagccccttacaccttcggccagggcaccaaggtggagatcaagcgtacggtggccgcccccagcgtgttcatcttcccccccagcgatgagcagctcaagagcggcaccgccagcgtggtgtgtctgctgaacaacttctacccccgggaggccaaagtgcagtggaaagtggacaacgccctgcagagcggcaacagccaggagagcgtgaccgagcaggacagcaaggactccacctacagcctgagcagcaccctgaccctgagcaaggccgactacgagaagcacaaagtgtacgcctgcgaagtgacccaccagggcctgtccagccccgtgaccaagagcttcaaccggggcgagtgc

SEQ ID NO: 170 - DNA, 1686 bp, Artificial Sequence
  Humanised
gaggtgcagctggtggagtctggcggcggactggtgcagcccggcagaagcctgagactgagctgtgccgccagcggcttcaccttcgacgactacgccatgcactgggtgaggcaggcccctggcaagggcctggagtgggtgtccgccatcacctggaatagcggccacatcgactacgccgacagcgtggagggcagattcaccatcagccgggacaacgccaagaacagcctgtacctgcagatgaacagcctgagagccgaggacaccgccgtgtactactgtgccaaggtgtcctacctgagcaccgccagcagcctggactactggggccagggcaccctggtgacagtctcgagcgctagcaccaagggccccagcgtgttccccctggcccccagcagcaagagcaccagcggcggcacagccgccctgggctgcctggtgaaggactacttccccgagcctgtgaccgtgtcctggaatagcggagccctgacctccggcgtgcacaccttccccgccgtgctgcagagcagcggcctgtactccctgagcagcgtggtgaccgtgcccagcagcagcctgggcacccagacctacatctgcaacgtgaaccacaagcccagcaacaccaaagtggacaagaaagtggagcccaagagctgcgataagacccacacctgccccccctgccctgcccccgagctgctgggcggacctagcgtgttcctgttcccccccaagcctaaggacaccctgatgatcagcaggacccccgaagtgacctgcgtggtggtggatgtgagccacgaggaccctgaagtgaagttcaactggtacgtggacggcgtggaagtgcacaacgccaagaccaagcccagagaggagcagtacaacagcacctaccgcgtggtgtctgtgctgaccgtgctgcaccaggattggctgaacggcaaggagtacaagtgcaaagtgagcaacaaggccctgcctgcccctatcgagaaaaccatcagcaaggccaagggccagcctagagagccccaggtctacaccctgcctccctccagagatgagctgaccaagaaccaggtgtccctgacctgtctggtgaagggcttctaccccagcgacatcgccgtggagtgggagagcaacggccagcccgagaacaactacaagaccaccccccctgtgctggacagcgatggcagcttcttcctgtactccaagctgaccgtggacaagagcagatggcagcagggcaacgtgttcagctgcagcgtgatgcacgaggccctgcacaatcactacacccagaagagtctgagcctgtcccctggcaagtcgaccggtgacatccagatgacccagagcccttcaagcctgagcgccagcgtgggcgacagagtgaccatcacctgccgggccagccagtggatcggcaacctgctggactggtatcagcagaagcccggcaaggcccccaagctgctgatctactacgccagcttcctgcagagcggcgtgcccagccggtttagcggcagcggctacggcaccgacttcaccctgaccatcagcagcctgcagcccgaggacttcgccacctactactgccagcaggccaaccctgcccccctgaccttcggccagggtaccaaggtggaaatcaaacgg

SEQ ID NO: 171 - DNA, 984 bp, Artificial Sequence
  Humanised
gacatccagatgacccagtctccatcctccctgtctgcatctgtaggagaccgtgtcaccatcacttgccgggcaagtcaggatatttacctgaatttagactggtatcagcagaaaccagggaaagcccctaagctcctgatcaattttggttccgagttgcaaagtggtgtcccatcacgtttcagtggcagtggatatgggacagatttcactctcaccatcagcagtctgcaacctgaagatttcgctacgtactactgtcaaccgtctttttacttcccttatacgttcggccaagggaccaaggtggaaatcaaacgtacggtggccgcccccagcgacatccagatgacccagtctccatcctccctgtctgcatctgtaggagaccgtgtcaccatcacttgccgggcaagtcagagcattagcagctatttaaattggtaccagcagaaaccagggaaagcccctaagctcctgatctatgctgcatccagtttgcaaagtggggtcccatcacgtttcagtggcagtggatctgggacagatttcactctcaccatcagcagtctgcaacctgaagattttgctacgtactactgtcaacagagttacagtacccctaatacgttcggccaagggaccaaggtggaaatcaaacgtacggtggccgcccccagcgtgttcatcttcccccccagcgatgagcagctcaagagcggcaccgccagcgtggtgtgtctgctgaacaacttctacccccgggaggccaaagtgcagtggaaagtggacaacgccctgcagagcggcaacagccaggagagcgtgaccgagcaggacagcaaggactccacctacagcctgagcagcaccctgaccctgagcaaggccgactacgagaagcacaaagtgtacgcctgcgaagtgacccaccagggcctgtccagccccgtgaccaagagcttcaaccggggcgagtgc

SEQ ID NO: 172 - DNA, 1707 bp, Artificial Sequence
  Humanised
gaggtgcagctgttggtgtctgggggaggcttggtacagcctggggggtccctgcgtctctcctgtgcagcctccggattcacctttaaggcttatccgatgatgtgggtccgccaggctccagggaagggtctagagtgggtttcagagatttcgccttcgggttcttatacatactacgcagactccgtgaagggccggttcaccatctcccgcgacaattccaagaacacgctgtatctgcaaatgaacagcctgcgtgccgaggacaccgcggtatattactgtgcgaaagatcctcggaagttagactactggggtcagggaaccctggtcaccgtctcgagcgctagcaccaagggccccagcgaggtgcagctgttggagtctgggggaggcttggtacagcctggggggtccctgcgtctctcctgtgcagcctccggattcacctttagcagctatgccatgagctgggtccgccaggctccagggaagggtctagagtgggtctcagctattagtggtagtggtggtagcacatactacgcagactccgtgaagggccggttcaccatctcccgcgacaattccaagaacacgctgtatctgcaaatgaacagcctgcgtgccgaggacaccgcggtatattactgtgcgaaaagttatggtgcttttgactactggggccagggaaccctggtcaccgtctcgagcgctagcaccaagggccccagcgtgttccccctggcccccagcagcaagagcaccagcggcggcacagccgccctgggctgcctggtgaaggactacttccccgagcctgtgaccgtgtcctggaatagcggagccctgacctccggcgtgcacaccttccccgccgtgctgcagagcagcggcctgtactccctgagcagcgtggtgaccgtgcccagcagcagcctgggcacccagacctacatctgcaacgtgaaccacaagcccagcaacaccaaagtggacaagaaagtggagcccaagagctgcgataagacccacacctgccccccctgccctgcccccgagctgctgggcggacctagcgtgttcctgttcccccccaagcctaaggacaccctgatgatcagcaggacccccgaagtgacctgcgtggtggtggatgtgagccacgaggaccctgaagtgaagttcaactggtacgtggacggcgtggaagtgcacaacgccaagaccaagcccagagaggagcagtacaacagcacctaccgcgtggtgtctgtgctgaccgtgctgcaccaggattggctgaacggcaaggagtacaagtgcaaagtgagcaacaaggccctgcctgcccctatcgagaaaaccatcagcaaggccaagggccagcctagagagccccaggtctacaccctgcctccctccagagatgagctgaccaagaaccaggtgtccctgacctgtctggtgaagggcttctaccccagcgacatcgccgtggagtgggagagcaacggccagcccgagaacaactacaagaccaccccccctgtgctggacagcgatggcagcttcttcctgtactccaagctgaccgtggacaagagcagatggcagcagggcaacgtgttcagctgcagcgtgatgcacgaggccctgcacaatcactacacccagaagagtctgagcctgtcccctggcaag

SEQ ID NO: 173 - DNA, 1695 bp, Artificial Sequence
  Humanised
caggtgcagctgaagcagagcggccctggcctggtgcagccctctcagagcctgagcatcacctgtaccgtgagcggcttcagcctgaccaattacggcgtgcattgggtgcggcagtctccaggcaagggcctggaatggctgggagtgatctggtccggcggcaacaccgactacaacacccccttcaccagcagactgagcatcaacaaggacaacagcaagagccaggtgttcttcaagatgaacagcctgcagagcaacgacaccgccatctactattgtgccagggccctgacctactacgactacgagttcgcctactggggccagggcaccctggtgaccgtgagcgccgctagcaccaagggccccagcgtgttccccctggcccccagcagcaagagcaccagcggcggcacagccgccctgggctgcctggtgaaggactacttccccgagcctgtgaccgtgtcctggaatagcggagccctgacctccggcgtgcacaccttccccgccgtgctgcagagcagcggcctgtactccctgagcagcgtggtgaccgtgcccagcagcagcctgggcacccagacctacatctgcaacgtgaaccacaagcccagcaacaccaaagtggacaagaaagtggagcccaagagctgcgataagacccacacctgccccccctgccctgcccccgagctgctgggcggacctagcgtgttcctgttcccccccaagcctaaggacaccctgatgatcagcaggacccccgaagtgacctgcgtggtggtggatgtgagccacgaggaccctgaagtgaagttcaactggtacgtggacggcgtggaagtgcacaacgccaagaccaagcccagagaggagcagtacaacagcacctaccgcgtggtgtctgtgctgaccgtgctgcaccaggattggctgaacggcaaggagtacaagtgcaaagtgagcaacaaggccctgcctgcccctatcgagaaaaccatcagcaaggccaagggccagcctagagagccccaggtctacaccctgcctccctccagagatgagctgaccaagaaccaggtgtccctgacctgtctggtgaagggcttctaccccagcgacatcgccgtggagtgggagagcaacggccagcccgagaacaactacaagaccaccccccctgtgctggacagcgatggcagcttcttcctgtactccaagctgaccgtggacaagagcagatggcagcagggcaacgtgttcagctgcagcgtgatgcacgaggccctgcacaatcactacacccagaagagtctgagcctgtcccctggcaaggaggtgcagctgttggtgtctgggggaggcttggtacagcctggggggtccctgcgtctctcctgtgcagcctccggattcacctttaaggcttatccgatgatgtgggtccgccaggctccagggaagggtctagagtgggtttcagagatttcgccttcgggttcttatacatactacgcagactccgtgaagggccggttcaccatctcccgcgacaattccaagaacacgctgtatctgcaaatgaacagcctgcgtgccgaggacaccgcggtatattactgtgcgaaagatcctcggaagttagactactggggtcagggaaccctggtcaccgtctcgagc

SEQ ID NO: 174 - protein, 565 aa, Artificial Sequence
  Humanised
QVQLKQSGPGLVQPSQSLSITCTVSGFSLTNYGVHWVRQSPGKGLEWLGVIWSGGNTDYNTPFTSRLSINKDNSKSQVFFKMNSLQSNDTAIYYCARALTYYDYEFAYWGQGTLVTVSAASTKGPSVFPLAPSSKSTSGGTAALGCLVKDYFPEPVTVSWNSGALTSGVHTFPAVLQSSGLYSLSSVVTVPSSSLGTQTYICNVNHKPSNTKVDKKVEPKSCDKTHTCPPCPAPELLGGPSVFLFPPKPKDTLMISRTPEVTCVVVDVSHEDPEVKFNWYVDGVEVHNAKTKPREEQYNSTYRVVSVLTVLHQDWLNGKEYKCKVSNKALPAPIEKTISKAKGQPREPQVYTLPPSRDELTKNQVSLTCLVKGFYPSDIAVEWESNGQPENNYKTTPPVLDSDGSFFLYSKLTVDKSRWQQGNVFSCSVMHEALHNHYTQKSLSLSPGKEVQLLVSGGGLVQPGGSLRLSCAASGFTFKAYPMMWVRQAPGKGLEWVSEISPSGSYTYYADSVKGRFTISRDNSKNTLYLQMNSLRAEDTAVYYCAKDPRKLDYWGQGTLVTVSS

SEQ ID NO: 175 - DNA, 1719 bp, Artificial Sequence
  Humanised
caggtgcagctgaagcagagcggccctggcctggtgcagccctctcagagcctgagcatcacctgtaccgtgagcggcttcagcctgaccaattacggcgtgcattgggtgcggcagtctccaggcaagggcctggaatggctgggagtgatctggtccggcggcaacaccgactacaacacccccttcaccagcagactgagcatcaacaaggacaacagcaagagccaggtgttcttcaagatgaacagcctgcagagcaacgacaccgccatctactattgtgccagggccctgacctactacgactacgagttcgcctactggggccagggcaccctggtgaccgtgagcgccgctagcaccaagggccccagcgtgttccccctggcccccagcagcaagagcaccagcggcggcacagccgccctgggctgcctggtgaaggactacttccccgagcctgtgaccgtgtcctggaatagcggagccctgacctccggcgtgcacaccttccccgccgtgctgcagagcagcggcctgtactccctgagcagcgtggtgaccgtgcccagcagcagcctgggcacccagacctacatctgcaacgtgaaccacaagcccagcaacaccaaagtggacaagaaagtggagcccaagagctgcgataagacccacacctgccccccctgccctgcccccgagctgctgggcggacctagcgtgttcctgttcccccccaagcctaaggacaccctgatgatcagcaggacccccgaagtgacctgcgtggtggtggatgtgagccacgaggaccctgaagtgaagttcaactggtacgtggacggcgtggaagtgcacaacgccaagaccaagcccagagaggagcagtacaacagcacctaccgcgtggtgtctgtgctgaccgtgctgcaccaggattggctgaacggcaaggagtacaagtgcaaagtgagcaacaaggccctgcctgcccctatcgagaaaaccatcagcaaggccaagggccagcctagagagccccaggtctacaccctgcctccctccagagatgagctgaccaagaaccaggtgtccctgacctgtctggtgaagggcttctaccccagcgacatcgccgtggagtgggagagcaacggccagcccgagaacaactacaagaccaccccccctgtgctggacagcgatggcagcttcttcctgtactccaagctgaccgtggacaagagcagatggcagcagggcaacgtgttcagctgcagcgtgatgcacgaggccctgcacaatcactacacccagaagagtctgagcctgtcccctggcaagtcgaccggtggtggaggtggatcagaggtgcagctgttggtgtctgggggaggcttggtacagcctggggggtccctgcgtctctcctgtgcagcctccggattcacctttaaggcttatccgatgatgtgggtccgccaggctccagggaagggtctagagtgggtttcagagatttcgccttcgggttcttatacatactacgcagactccgtgaagggccggttcaccatctcccgcgacaattccaagaacacgctgtatctgcaaatgaacagcctgcgtgccgaggacaccgcggtatattactgtgcgaaagatcctcggaagttagactactggggtcagggaaccctggtcaccgtctcgagc

SEQ ID NO: 176 - protein, 573 aa, Artificial Sequence
  Humanised
QVQLKQSGPGLVQPSQSLSITCTVSGFSLTNYGVHWVRQSPGKGLEWLGVIWSGGNTDYNTPFTSRLSINKDNSKSQVFFKMNSLQSNDTAIYYCARALTYYDYEFAYWGQGTLVTVSAASTKGPSVFPLAPSSKSTSGGTAALGCLVKDYFPEPVTVSWNSGALTSGVHTFPAVLQSSGLYSLSSVVTVPSSSLGTQTYICNVNHKPSNTKVDKKVEPKSCDKTHTCPPCPAPELLGGPSVFLFPPKPKDTLMISRTPEVTCVVVDVSHEDPEVKFNWYVDGVEVHNAKTKPREEQYNSTYRVVSVLTVLHQDWLNGKEYKCKVSNKALPAPIEKTISKAKGQPREPQVYTLPPSRDELTKNQVSLTCLVKGFYPSDIAVEWESNGQPENNYKTTPPVLDSDGSFFLYSKLTVDKSRWQQGNVFSCSVMHEALHNHYTQKSLSLSPGKSTGGGGGSEVQLLVSGGGLVQPGGSLRLSCAASGFTFKAYPMMWVRQAPGKGLEWVSEISPSGSYTYYADSVKGRFTISRDNSKNTLYLQMNSLRAEDTAVYYCAKDPRKLDYWGQGTLVTVSS

SEQ ID NO: 177 - DNA, 1734 bp, Artificial Sequence
  Humanised
caggtgcagctgaagcagagcggccctggcctggtgcagccctctcagagcctgagcatcacctgtaccgtgagcggcttcagcctgaccaattacggcgtgcattgggtgcggcagtctccaggcaagggcctggaatggctgggagtgatctggtccggcggcaacaccgactacaacacccccttcaccagcagactgagcatcaacaaggacaacagcaagagccaggtgttcttcaagatgaacagcctgcagagcaacgacaccgccatctactattgtgccagggccctgacctactacgactacgagttcgcctactggggccagggcaccctggtgaccgtgagcgccgctagcaccaagggccccagcgtgttccccctggcccccagcagcaagagcaccagcggcggcacagccgccctgggctgcctggtgaaggactacttccccgagcctgtgaccgtgtcctggaatagcggagccctgacctccggcgtgcacaccttccccgccgtgctgcagagcagcggcctgtactccctgagcagcgtggtgaccgtgcccagcagcagcctgggcacccagacctacatctgcaacgtgaaccacaagcccagcaacaccaaagtggacaagaaagtggagcccaagagctgcgataagacccacacctgccccccctgccctgcccccgagctgctgggcggacctagcgtgttcctgttcccccccaagcctaaggacaccctgatgatcagcaggacccccgaagtgacctgcgtggtggtggatgtgagccacgaggaccctgaagtgaagttcaactggtacgtggacggcgtggaagtgcacaacgccaagaccaagcccagagaggagcagtacaacagcacctaccgcgtggtgtctgtgctgaccgtgctgcaccaggattggctgaacggcaaggagtacaagtgcaaagtgagcaacaaggccctgcctgcccctatcgagaaaaccatcagcaaggccaagggccagcctagagagccccaggtctacaccctgcctccctccagagatgagctgaccaagaaccaggtgtccctgacctgtctggtgaagggcttctaccccagcgacatcgccgtggagtgggagagcaacggccagcccgagaacaactacaagaccaccccccctgtgctggacagcgatggcagcttcttcctgtactccaagctgaccgtggacaagagcagatggcagcagggcaacgtgttcagctgcagcgtgatgcacgaggccctgcacaatcactacacccagaagagtctgagcctgtcccctggcaagtcgaccggtggtggaggtggatcaggtggaggtggatcagaggtgcagctgttggtgtctgggggaggcttggtacagcctggggggtccctgcgtctctcctgtgcagcctccggattcacctttaaggcttatccgatgatgtgggtccgccaggctccagggaagggtctagagtgggtttcagagatttcgccttcgggttcttatacatactacgcagactccgtgaagggccggttcaccatctcccgcgacaattccaagaacacgctgtatctgcaaatgaacagcctgcgtgccgaggacaccgcggtatattactgtgcgaaagatcctcggaagttagactactggggtcagggaaccctggtcaccgtctcgagc

SEQ ID NO: 178 - protein, 578 aa, Artificial Sequence
  Humanised
QVQLKQSGPGLVQPSQSLSITCTVSGFSLTNYGVHWVRQSPGKGLEWLGVIWSGGNTDYNTPFTSRLSINKDNSKSQVFFKMNSLQSNDTAIYYCARALTYYDYEFAYWGQGTLVTVSAASTKGPSVFPLAPSSKSTSGGTAALGCLVKDYFPEPVTVSWNSGALTSGVHTFPAVLQSSGLYSLSSVVTVPSSSLGTQTYICNVNHKPSNTKVDKKVEPKSCDKTHTCPPCPAPELLGGPSVFLFPPKPKDTLMISRTPEVTCVVVDVSHEDPEVKFNWYVDGVEVHNAKTKPREEQYNSTYRVVSVLTVLHQDWLNGKEYKCKVSNKALPAPIEKTISKAKGQPREPQVYTLPPSRDELTKNQVSLTCLVKGFYPSDIAVEWESNGQPENNYKTTPPVLDSDGSFFLYSKLTVDKSRWQQGNVFSCSVMHEALHNHYTQKSLSLSPGKSTGGGGGSGGGGSEVQLLVSGGGLVQPGGSLRLSCAASGFTFKAYPMMWVRQAPGKGLEWVSEISPSGSYTYYADSVKGRFTISRDNSKNTLYLQMNSLRAEDTAVYYCAKDPRKLDYWGQGTLVTVSS

SEQ ID NO: 179 - DNA, 1692 bp, Artificial Sequence
  Humanised
gaggtgcagctggtcgagtctggcggcggactggtgcagcctggcggcagcctgagactgagctgcgccgccagcggctacaccttcaccaactacggcatgaactgggtgcggcaggcccctggcaagggcctggaatgggtgggctggatcaacacctacaccggcgagcccacctacgccgccgacttcaagcggcggttcaccttcagcctggacaccagcaagagcaccgcctacctgcagatgaacagcctgcgggccgaggacaccgccgtgtactactgcgccaagtacccccactactacggcagcagccactggtacttcgactactgggggcagggtaccctggtcaccgtctcgagcgctagcaccaagggccccagcgtgttccccctggcccccagcagcaagagcaccagcggcggcacagccgccctgggctgcctggtgaaggactacttccccgagcctgtgaccgtgtcctggaatagcggagccctgacctccggcgtgcacaccttccccgccgtgctgcagagcagcggcctgtactccctgagcagcgtggtgaccgtgcccagcagcagcctgggcacccagacctacatctgcaacgtgaaccacaagcccagcaacaccaaagtggacaagaaagtggagcccaagagctgcgataagacccacacctgccccccctgccctgcccccgagctgctgggcggacctagcgtgttcctgttcccccccaagcctaaggacaccctgatgatcagcaggacccccgaagtgacctgcgtggtggtggatgtgagccacgaggaccctgaagtgaagttcaactggtacgtggacggcgtggaagtgcacaacgccaagaccaagcccagagaggagcagtacaacagcacctaccgcgtggtgtctgtgctgaccgtgctgcaccaggattggctgaacggcaaggagtacaagtgcaaagtgagcaacaaggccctgcctgcccctatcgagaaaaccatcagcaaggccaagggccagcctagagagccccaggtctacaccctgcctccctccagagatgagctgaccaagaaccaggtgtccctgacctgtctggtgaagggcttctaccccagcgacatcgccgtggagtgggagagcaacggccagcccgagaacaactacaagaccaccccccctgtgctggacagcgatggcagcttcttcctgtactccaagctgaccgtggacaagagcagatggcagcagggcaacgtgttcagctgcagcgtgatgcacgaggccctgcacaatcactacacccagaagagtctgagcctgtcccctggcaagtcgaccggtgacatccagatgacccagagcccttcaagcctgagcgccagcgtgggcgacagagtgaccatcacctgccgggccagccagtggatcggcaacctgctggactggtatcagcagaagcccggcaaggcccccaagctgctgatctactacgccagcttcctgcagagcggcgtgcccagccggtttagcggcagcggctacggcaccgacttcaccctgaccatcagcagcctgcagcccgaggacttcgccacctactactgccagcaggccaaccctgcccccctgaccttcggccagggtaccaaggtggaaatcaaacgg

SEQ ID NO: 180 - protein, 564 aa, Artificial Sequence
  Humanised
EVQLVESGGGLVQPGGSLRLSCAASGYTFTNYGMNWVRQAPGKGLEWVGWINTYTGEPTYAADFKRRFTFSLDTSKSTAYLQMNSLRAEDTAVYYCAKYPHYYGSSHWYFDYWGQGTLVTVSSASTKGPSVFPLAPSSKSTSGGTAALGCLVKDYFPEPVTVSWNSGALTSGVHTFPAVLQSSGLYSLSSVVTVPSSSLGTQTYICNVNHKPSNTKVDKKVEPKSCDKTHTCPPCPAPELLGGPSVFLFPPKPKDTLMISRTPEVTCVVVDVSHEDPEVKFNWYVDGVEVHNAKTKPREEQYNSTYRVVSVLTVLHQDWLNGKEYKCKVSNKALPAPIEKTISKAKGQPREPQVYTLPPSRDELTKNQVSLTCLVKGFYPSDIAVEWESNGQPENNYKTTPPVLDSDGSFFLYSKLTVDKSRWQQGNVFSCSVMHEALHNHYTQKSLSLSPGKSTGDIQMTQSPSSLSASVGDRVTITCRASQWIGNLLDWYQQKPGKAPKLLIYYASFLQSGVPSRFSGSGYGTDFTLTISSLQPEDFATYYCQQANPAPLTFGQGTKVEIKR

SEQ ID NO: 181 - DNA, 642 bp, Artificial Sequence
  Humanised
gacatccagatgacccagagccccagcagcctgagcgccagcgtgggcgacagagtgaccatcacctgcagcgccagccaggacatcagcaactacctgaactggtatcagcagaagcccggcaaggcccccaaggtgctgatctacttcaccagctccctgcacagcggcgtgcccagccggtttagcggcagcggctccggcaccgacttcaccctgaccatcagcagcctgcagcccgaggacttcgccacctactactgccagcagtacagcaccgtgccctggaccttcggccagggtaccaaggtggagatcaagcgtacggtggccgctcccagcgtgttcatcttcccccccagcgacgagcagctgaagagcggcaccgcctccgtggtgtgcctgctgaacaacttctacccccgggaggccaaggtgcagtggaaggtggacaacgccctgcagtccggcaacagccaggaaagcgtcaccgagcaggactccaaggactccacctacagcctgagcagcaccctgaccctgagcaaggccgactacgagaagcacaaggtgtacgcctgcgaagtgacccaccagggcctgtccagccccgtgaccaagagcttcaaccggggcgagtgc

SEQ ID NO: 182 - protein, 214 aa, Artificial Sequence
  Humanised
DIQMTQSPSSLSASVGDRVTITCSASQDISNYLNWYQQKPGKAPKVLIYFTSSLHSGVPSRFSGSGSGTDFTLTISSLQPEDFATYYCQQYSTVPWTFGQGTKVEIKRTVAAPSVFIFPPSDEQLKSGTASVVCLLNNFYPREAKVQWKVDNALQSGNSQESVTEQDSKDSTYSLSSTLTLSKADYEKHKVYACEVTHQGLSSPVTKSFNRGEC

SEQ ID NO: 183 - DNA, 1710 bp, Artificial Sequence
  Humanised
caggtgcagctgaagcagagcggccctggcctggtgcagccctctcagagcctgagcatcacctgtaccgtgagcggcttcagcctgaccaattacggcgtgcattgggtgcggcagtctccaggcaagggcctggaatggctgggagtgatctggtccggcggcaacaccgactacaacacccccttcaccagcagactgagcatcaacaaggacaacagcaagagccaggtgttcttcaagatgaacagcctgcagagcaacgacaccgccatctactattgtgccagggccctgacctactacgactacgagttcgcctactggggccagggcaccctggtgaccgtgagcgccgctagcaccaagggccccagcgtgttccccctggcccccagcagcaagagcaccagcggcggcacagccgccctgggctgcctggtgaaggactacttccccgagcctgtgaccgtgtcctggaatagcggagccctgacctccggcgtgcacaccttccccgccgtgctgcagagcagcggcctgtactccctgagcagcgtggtgaccgtgcccagcagcagcctgggcacccagacctacatctgcaacgtgaaccacaagcccagcaacaccaaagtggacaagaaagtggagcccaagagctgcgataagacccacacctgccccccctgccctgcccccgagctgctgggcggacctagcgtgttcctgttcccccccaagcctaaggacaccctgatgatcagcaggacccccgaagtgacctgcgtggtggtggatgtgagccacgaggaccctgaagtgaagttcaactggtacgtggacggcgtggaagtgcacaacgccaagaccaagcccagagaggagcagtacaacagcacctaccgcgtggtgtctgtgctgaccgtgctgcaccaggattggctgaacggcaaggagtacaagtgcaaagtgagcaacaaggccctgcctgcccctatcgagaaaaccatcagcaaggccaagggccagcctagagagccccaggtctacaccctgcctccctccagagatgagctgaccaagaaccaggtgtccctgacctgtctggtgaagggcttctaccccagcgacatcgccgtggagtgggagagcaacggccagcccgagaacaactacaagaccaccccccctgtgctggacagcgatggcagcttcttcctgtactccaagctgaccgtggacaagagcagatggcagcagggcaacgtgttcagctgcagcgtgatgcacgaggccctgcacaatcactacacccagaagagtctgagcctgtcccctggcaagtcgaccggtggggtgcagctgttggagtctgggggaggcttggtacagcctggggggtccctgcgtctctcctgtgcagcctccggattcaccttcgcttggtatgatatggggtgggtccgccaggctccagggaagggtctagagtgggtctcaagtattgattggcatggtgaggttacatactacgcagactccgtgaagggccggttcaccatctcccgcgacaattccaagaacacgctgtatctgcaaatgaacagcctgcgtgccgaggacaccgcggtatattactgtgcgacagcggaggacgagccggggtatgactactggggccagggaaccctggtcaccgtctcgagc

SEQ ID NO: 184 - protein, 570 aa, Artificial Sequence
  Humanised
QVQLKQSGPGLVQPSQSLSITCTVSGFSLTNYGVHWVRQSPGKGLEWLGVIWSGGNTDYNTPFTSRLSINKDNSKSQVFFKMNSLQSNDTAIYYCARALTYYDYEFAYWGQGTLVTVSAASTKGPSVFPLAPSSKSTSGGTAALGCLVKDYFPEPVTVSWNSGALTSGVHTFPAVLQSSGLYSLSSVVTVPSSSLGTQTYICNVNHKPSNTKVDKKVEPKSCDKTHTCPPCPAPELLGGPSVFLFPPKPKDTLMISRTPEVTCVVVDVSHEDPEVKFNWYVDGVEVHNAKTKPREEQYNSTYRVVSVLTVLHQDWLNGKEYKCKVSNKALPAPIEKTISKAKGQPREPQVYTLPPSRDELTKNQVSLTCLVKGFYPSDIAVEWESNGQPENNYKTTPPVLDSDGSFFLYSKLTVDKSRWQQGNVFSCSVMHEALHNHYTQKSLSLSPGKSTGGVQLLESGGGLVQPGGSLRLSCAASGFTFAWYDMGWVRQAPGKGLEWVSSIDWHGEVTYYADSVKGRFTISRDNSKNTLYLQMNSLRAEDTAVYYCATAEDEPGYDYWGQGTLVTVSS

SEQ ID NO: 185 - protein, 562 aa, Artificial Sequence
  Humanised
EVQLVESGGGLVQPGRSLRLSCAASGFTFDDYAMHWVRQAPGKGLEWVSAITWNSGHIDYADSVEGRFTISRDNAKNSLYLQMNSLRAEDTAVYYCAKVSYLSTASSLDYWGQGTLVTVSSASTKGPSVFPLAPSSKSTSGGTAALGCLVKDYFPEPVTVSWNSGALTSGVHTFPAVLQSSGLYSLSSVVTVPSSSLGTQTYICNVNHKPSNTKVDKKVEPKSCDKTHTCPPCPAPELLGGPSVFLFPPKPKDTLMISRTPEVTCVVVDVSHEDPEVKFNWYVDGVEVHNAKTKPREEQYNSTYRVVSVLTVLHQDWLNGKEYKCKVSNKALPAPIEKTISKAKGQPREPQVYTLPPSRDELTKNQVSLTCLVKGFYPSDIAVEWESNGQPENNYKTTPPVLDSDGSFFLYSKLTVDKSRWQQGNVFSCSVMHEALHNHYTQKSLSLSPGKSTGDIQMTQSPSSLSASVGDRVTITCRASQWIGPELRWYQQKPGKAPKLLIYHTSILQSGVPSRFSGSGSGTDFTLTISSLQPEDFATYYCQQYMFQPMTFGQGTKVEIKR

SEQ ID NO: 186 - protein, 560 aa, Artificial Sequence
  Humanised
QVQLKQSGPGLVQPSQSLSITCTVSGFSLTNYGVHWVRQSPGKGLEWLGVIWSGGNTDYNTPFTSRLSINKDNSKSQVFFKMNSLQSNDTAIYYCARALTYYDYEFAYWGQGTLVTVSAASTKGPSVFPLAPSSKSTSGGTAALGCLVKDYFPEPVTVSWNSGALTSGVHTFPAVLQSSGLYSLSSVVTVPSSSLGTQTYICNVNHKPSNTKVDKKVEPKSCDKTHTCPPCPAPELLGGPSVFLFPPKPKDTLMISRTPEVTCVVVDVSHEDPEVKFNWYVDGVEVHNAKTKPREEQYNSTYRVVSVLTVLHQDWLNGKEYKCKVSNKALPAPIEKTISKAKGQPREPQVYTLPPSRDELTKNQVSLTCLVKGFYPSDIAVEWESNGQPENNYKTTPPVLDSDGSFFLYSKLTVDKSRWQQGNVFSCSVMHEALHNHYTQKSLSLSPGKSTGDIQMTQSPSSLSASVGDRVTITCRASQWIGPELRWYQQKPGKAPKLLIYHTSILQSGVPSRFSGSGSGTDFTLTISSLQPEDFATYYCQQYMFQPMTFGQGTKVEIKR

SEQ ID NO: 187 - DNA, 1002 bp, Artificial Sequence
  Humanised
gacatcctgctgacccagagccccgtgatcctgagcgtgagccctggcgagagagtgagcttcagctgccgggccagccagagcatcggcaccaacatccactggtatcagcagcggaccaacggcagccccaggctgctgatcaagtacgccagcgagtccatcagcggcatccccagccggttcagcggcagcggctccggcaccgacttcaccctgagcatcaacagcgtggagagcgaggatatcgccgactactactgccagcagaacaacaactggcccaccaccttcggagccggcaccaagctggaactgaagcgtacggtggccgcccccagcgtgttcatcttcccccccagcgatgagcagctcaagagcggcaccgccagcgtggtgtgtctgctgaacaacttctacccccgggaggccaaagtgcagtggaaagtggacaacgccctgcagagcggcaacagccaggagagcgtgaccgagcaggacagcaaggactccacctacagcctgagcagcaccctgaccctgagcaaggccgactacgagaagcacaaagtgtacgcctgcgaagtgacccaccagggcctgtccagccccgtgaccaagagcttcaaccggggcgagtgcggatccaccggcgaggtgcagctgttggtgtctgggggaggcttggtacagcctggggggtccctgcgtctctcctgtgcagcctccggattcacctttaaggcttatccgatgatgtgggtccgccaggctccagggaagggtctagagtgggtttcagagatttcgccttcgggttcttatacatactacgcagactccgtgaagggccggttcaccatctcccgcgacaattccaagaacacgctgtatctgcaaatgaacagcctgcgtgccgaggacaccgcggtatattactgtgcgaaagatcctcggaagttagactactggggtcagggaaccctggtcaccgtctcgagc

SEQ ID NO: 188 - protein, 334 aa, Artificial Sequence
  Humanised
DILLTQSPVILSVSPGERVSFSCRASQSIGTNIHWYQQRTNGSPRLLIKYASESISGIPSRFSGSGSGTDFTLSINSVESEDIADYYCQQNNNWPTTFGAGTKLELKRTVAAPSVFIFPPSDEQLKSGTASVVCLLNNFYPREAKVQWKVDNALQSGNSQESVTEQDSKDSTYSLSSTLTLSKADYEKHKVYACEVTHQGLSSPVTKSFNRGECGSTGEVQLLVSGGGLVQPGGSLRLSCAASGFTFKAYPMMWVRQAPGKGLEWVSEISPSGSYTYYADSVKGRFTISRDNSKNTLYLQMNSLRAEDTAVYYCAKDPRKLDYWGQGTLVTVSS

SEQ ID NO: 189 - DNA, 1014 bp, Artificial Sequence
  Humanised
gacatcctgctgacccagagccccgtgatcctgagcgtgagccctggcgagagagtgagcttcagctgccgggccagccagagcatcggcaccaacatccactggtatcagcagcggaccaacggcagccccaggctgctgatcaagtacgccagcgagtccatcagcggcatccccagccggttcagcggcagcggctccggcaccgacttcaccctgagcatcaacagcgtggagagcgaggatatcgccgactactactgccagcagaacaacaactggcccaccaccttcggagccggcaccaagctggaactgaagcgtacggtggccgcccccagcgtgttcatcttcccccccagcgatgagcagctcaagagcggcaccgccagcgtggtgtgtctgctgaacaacttctacccccgggaggccaaagtgcagtggaaagtggacaacgccctgcagagcggcaacagccaggagagcgtgaccgagcaggacagcaaggactccacctacagcctgagcagcaccctgaccctgagcaaggccgactacgagaagcacaaagtgtacgcctgcgaagtgacccaccagggcctgtccagccccgtgaccaagagcttcaaccggggcgagtgcggatccacggtggccgcccccagcgaggtgcagctgttggtgtctgggggaggcttggtacagcctggggggtccctgcgtctctcctgtgcagcctccggattcacctttaaggcttatccgatgatgtgggtccgccaggctccagggaagggtctagagtgggtttcagagatttcgccttcgggttcttatacatactacgcagactccgtgaagggccggttcaccatctcccgcgacaattccaagaacacgctgtatctgcaaatgaacagcctgcgtgccgaggacaccgcggtatattactgtgcgaaagatcctcggaagttagactactggggtcagggaaccctggtcaccgtctcgagc

SEQ ID NO: 190 - protein, 338 aa, Artificial Sequence
  Humanised
DILLTQSPVILSVSPGERVSFSCRASQSIGTNIHWYQQRTNGSPRLLIKYASESISGIPSRFSGSGSGTDFTLSINSVESEDIADYYCQQNNNWPTTFGAGTKLELKRTVAAPSVFIFPPSDEQLKSGTASVVCLLNNFYPREAKVQWKVDNALQSGNSQESVTEQDSKDSTYSLSSTLTLSKADYEKHKVYACEVTHQGLSSPVTKSFNRGECGSTVAAPSEVQLLVSGGGLVQPGGSLRLSCAASGFTFKAYPMMWVRQAPGKGLEWVSEISPSGSYTYYADSVKGRFTISRDNSKNTLYLQMNSLRAEDTAVYYCAKDPRKLDYWGQGTLVTVSS

SEQ ID NO: 191 - protein, 449 aa, Artificial Sequence
  Humanised
QVTLRESGPALVKPTQTLTLTCTVSGFSLTSYSVHWVRQPPGKGLEWLGVIWASGGTDYNSALMSRLSISKDTSRNQVVLTMTNMDPVDTATYYCARDPPSSLLRLDYWGRGTPVTVSSASTKGPSVFPLAPSSKSTSGGTAALGCLVKDYFPEPVTVSWNSGALTSGVHTFPAVLQSSGLYSLSSVVTVPSSSLGTQTYICNVNHKPSNTKVDKRVEPKSCDKTHTCPPCPAPELLGGPSVFLFPPKPKDTLMISRTPEVTCVVVDVSHEDPEVKFNWYVDGVEVHNAKTKPREEQYNSTYRVVSVLTVLHQDWLNGKEYKCKVSNKALPAPIEKTISKAKGQPREPQVYTLPPSREEMTKNQVSLTCLVKGFYPSDIAVEWESNGQPENNYKTTPPVLDSDGSFFLYSKLTVDKSRWQQGNVFSCSVMHEALHNHYTQKSLSLSPGK

SEQ ID NO: 192 - DNA, 1746 bp, Artificial Sequence
  Humanised
caggtgcagctcgtgcagagcggcgccgaagtgaaaaagcccggcagcagcgtgaaggtgagctgcaaggcctccggcttctacatcaaggacacctacatgcactgggtcaggcaggctcctggccagggcctggagtggatgggcactatcgaccccgccaacggcaacaccaagtacgtgcccaagttccagggcagggtgaccatcaccgccgatgagagcaccagcaccgcctacatggaactgagcagcctgaggtctgaggacaccgccgtgtactattgcgccaggagcatctacgacgactaccactacgacgactactacgccatggactactggggacagggcacactagtgaccgtgtccagcgccagcaccaagggccccagcgtgttccccctggcccccagcagcaagagcaccagcggcggcacagccgccctgggctgcctggtgaaggactacttccccgaaccggtgaccgtgtcctggaacagcggagccctgaccagcggcgtgcacaccttccccgccgtgctgcagagcagcggcctgtacagcctgagcagcgtggtgaccgtgcccagcagcagcctgggcacccagacctacatctgtaacgtgaaccacaagcccagcaacaccaaggtggacaagaaggtggagcccaagagctgtgacaagacccacacctgccccccctgccctgcccccgagctgctgggaggccccagcgtgttcctgttcccccccaagcctaaggacaccctgatgatcagcagaacccccgaggtgacctgtgtggtggtggatgtgagccacgaggaccctgaggtgaagttcaactggtacgtggacggcgtggaggtgcacaatgccaagaccaagcccagggaggagcagtacaacagcacctaccgggtggtgtccgtgctgaccgtgctgcaccaggattggctgaacggcaaggagtacaagtgtaaggtgtccaacaaggccctgcctgcccctatcgagaaaaccatcagcaaggccaagggccagcccagagagccccaggtgtacaccctgccccctagcagagatgagctgaccaagaaccaggtgtccctgacctgcctggtgaagggcttctaccccagcgacatcgccgtggagtgggagagcaacggccagcccgagaacaactacaagaccaccccccctgtgctggacagcgatggcagcttcttcctgtacagcaagctgaccgtggacaagagcagatggcagcagggcaacgtgttcagctgctccgtgatgcacgaggccctgcacaatcactacacccagaagagcctgagcctgtcccctggcaagggatcagccagcaccaagggccccacgggatccgaagtgcagctcctggagagcggcggcggcctggtgcagcccggcggcagcctgaggctgagctgcgccgctagcggcttcaccttcaggaacttcggcatgggctgggtcaggcaggcccccggcaagggcctggagtgggtcagctggatcatcagctccggcaccgagacctactacgccgacagcgtgaagggcaggttcaccatcagccgcgacaacagcaagaacaccctgtacctgcagatgaacagcctgagggccgaggacaccgccgtctactactgcgccaagagcctgggcaggttcgactactggggacaggggaccctggtgactgtgagcagc

SEQ ID NO: 193 - protein, 698 aa, Artificial Sequence
  Humanised
EVTLRESGPALVKPTQTLTLTCTFSGFSLSKSVMGVSWIRQPPGKALEWLAHIYWDDDKYYNPSLKSRLTISKDTSKNQVVLTMTNMDPVDTATYYCARRGIRSAMDYWGQGTTVTVSSASTKGPEVQLVQSGTEVKKPGESLKISCKGSGYTVTSYWIGWVRQMPGKGLEWMGFIYPGDSETRYSPTFQGQVTISADKSFNTAFLQWSSLKASDTAMYYCARVGSGWYPYTFDIWGQGTLVTVSSASTKGPSVFPLAPSSKSTSGGTAALGCLVKDYFPEPVTVSWNSGALTSGVHTFPAVLQSSGLYSLSSVVTVPSSSLGTQTYICNVNHKPSNTKVDKKVEPKSCDKTHTCPPCPAPELLGGPSVFLFPPKPKDTLMISRTPEVTCVVVDVSHEDPEVKFNWYVDGVEVHNAKTKPREEQYNSTYRVVSVLTVLHQDWLNGKEYKCKVSNKALPAPIEKTISKAKGQPREPQVYTLPPSRDELTKNQVSLTCLVKGFYPSDIAVEWESNGQPENNYKTTPPVLDSDGSFFLYSKLTVDKSRWQQGNVFSCSVMHEALHNHYTQKSLSLSPGKTVAAPSEVQLLESGGGLVQPGGSLRLSCAASGFTFRNFGMGWVRQAPGKGLEWVSWIISSGTETYYADSVKGRFTISRDNSKNTLYLQMNSLRAEDTAVYYCAKSLGRFDYWGQGTLVTVSS

SEQ ID NO: 194 - protein, 328 aa, Artificial Sequence
  Humanised
DIVMTQSPDSLAVSLGERATINCKASQSVSNDVAWYQQKPGQPPKLLIYYASNRYTGVPDRFSGSGSGTDFTLTISSLQAEDVAVYYCQQDYNSPWTFGGGTKVEIKRTVAAPEIVMTQSPATLSVSPGERATLSCRASESASSNLAWYQQKPGQAPRLFIYTASTRATDIPARFSGSGSGTEFTLTISSLQSEDFAVYYCQQYNNWPSITFGQGTRLEIKRTVAAPSVFIFPPSDEQLKSGTASVVCLLNNFYPREAKVQWKVDNALQSGNSQESVTEQDSKDSTYSLSSTLTLSKADYEKHKVYACEVTHQGLSSPVTKSFNRGEC

SEQ ID NO: 195 - protein, 696 aa, Artificial Sequence
  Humanised
QVTLRESGPALVKPTQTLTLTCTVSGFSLTSYSVHWVRQPPGKGLEWLGVIWASGGTDYNSALMSRLSISKDTSRNQVVLTMTNMDPVDTATYYCARDPPSSLLRLDYWGRGTLVTVSSASTKGPSVFPLAPSSKSTSGGTAALGCLVKDYFPEPVTVSWNSGALTSGVHTFPAVLQSSGLYSLSSVVTVPSSSLGTQTYICNVNHKPSNTKVDKKVEPKSCDKTHTCPPCPAPELLGGPSVFLFPPKPKDTLMISRTPEVTCVVVDVSHEDPEVKFNWYVDGVEVHNAKTKPREEQYNSTYRVVSVLTVLHQDWLNGKEYKCKVSNKALPAPIEKTISKAKGQPREPQVYTLPPSRDELTKNQVSLTCLVKGFYPSDIAVEWESNGQPENNYKTTPPVLDSDGSFFLYSKLTVDKSRWQQGNVFSCSVMHEALHNHYTQKSLSLSPGKGGGGSGVQLLESGGGLVQPGGSLRLSCAASGFTFAWYDMGWVRQAPGKGLEWVSSIDWHGEVTYYADSVKGRFTISRDNSKNTLYLQMNSLRAEDTAVYYCATAEDEPGYDYWGQGTLVTVSSTVAAPSGSEVQLLESGGGLVQPGGSLRLSCAASGFTFRNFGMGWVRQAPGKGLEWVSWIISSGTETYYADSVKGRFTISRDNSKNTLYLQMNSLRAEDTAVYYCAKSLGRFDYWGQGTLVTVSS

SEQ ID NO: 196 - protein, 693 aa, Artificial Sequence
  Humanised
QVQLQQPGAELVKPGASVKMSCKASGYTFTSYNMHWVKQTPGRGLEWIGAIYPGNGDTSYNQKFKGKATLTADKSSSTAYMQLSSLTSEDSAVYYCARSTYYGGDWYFNVWGAGTLVTVSSASTKGPSVFPLAPSSKSTSGGTAALGCLVKDYFPEPVTVSWNSGALTSGVHTFPAVLQSSGLYSLSSVVTVPSSSLGTQTYICNVNHKPSNTKVDKKVEPKSCDKTHTCPPCPAPELLGGPSVFLFPPKPKDTLMISRTPEVTCVVVDVSHEDPEVKFNWYVDGVEVHNAKTKPREEQYNSTYRVVSVLTVLHQDWLNGKEYKCKVSNKALPAPIEKTISKAKGQPREPQVYTLPPSRDELTKNQVSLTCLVKGFYPSDIAVEWESNGQPENNYKTTPPVLDSDGSFFLYSKLTVDKSRWQQGNVFSCSVMHEALHNHYTQKSLSLSPGKTVAAPSGSDIQMTQSPSSLSASVGDRVTITCRASRPISDWLHWYQQKPGKAPKLLIAWASSLQGGVPSRFSGSGSGTDFTLTISSLQPEDFATYYCLQEGWGPPTFGQGTKVEIKRTVAAPSGSGVQLLESGGGLVQPGGSLRLSCAASGFTFAWYDMGWVRQAPGKGLEWVSSIDWHGEVTYYADSVKGRFTISRDNSKNTLYLQMNSLRAEDTAVYYCATAEDEPGYDYWGQGTLVTVSS

SEQ ID NO: 197 - protein, 701 aa, Artificial Sequence [sequence omitted]

SEQ ID NO: 198 - protein, 567 aa, Artificial Sequence
  Humanised
EVQLVESGGGLVQPGGSLRLSCAASGYTFTSYWLHWVRQAPGKGLEWVGMIDPSNSDTRFNPNFKDRFTISADTSKNTAYLQMNSLRAEDTAVYYCATYRSYVTPLDYWGQGTLVTVSSASTKGPSVFPLAPSSKSTSGGTAALGCLVKDYFPEPVTVSWNSGALTSGVHTFPAVLQSSGLYSLSSVVTVPSSSLGTQTYICNVNHKPSNTKVDKKVEPKSCDKTHTCPPCPAPELLGGPSVFLFPPKPKDTLMISRTPEVTCVVVDVSHEDPEVKFNWYVDGVEVHNAKTKPREEQYNSTYRVVSVLTVLHQDWLNGKEYKCKVSNKALPAPIEKTISKAKGQPREPQVYTLPPSRDELTKNQVSLSCAVKGFYPSDIAVEWESNGQPENNYKTTPPVLDSDGSFFLVSKLTVDKSRWQQGNVFSCSVMHEALHNHYTQKSLSLSPGKGSEVQLLVSGGGLVQPGGSLRLSCAASGFTFKAYPMMWVRQAPGKGLEWVSEISPSGSYTYYADSVKGRFTISRDNSKNTLYLQMNSLRAEDTAVYYCAKDPRKLDYWGQGTLVTVSS

SEQ ID NO: 199 - protein, 340 aa, Artificial Sequence
  Humanised
CPPCPAPELLGGPSVFLFPPKPKDTLMISRTPEVTCVVVDVSHEDPEVKFNWYVDGVEVHNAKTKPREEQYNSTYRVVSVLTVLHQDWLNGKEYKCKVSNKALPAPIEKTISKAKGQPREPQVYTLPPSRDELTKNQVSLWCLVKGFYPSDIAVEWESNGQPENNYKTTPPVLDSDGSFFLYSKLTVDKSRWQQGNVFSCSVMHEALHNHYTQKSLSLSPGKGSEVQLLVSGGGLVQPGGSLRLSCAASGFTFKAYPMMWVRQAPGKGLEWVSEISPSGSYTYYADSVKGRFTISRDNSKNTLYLQMNSLRAEDTAVYYCAKDPRKLDYWGQGTLVTVSS

SEQ ID NO: 200 - protein, 220 aa, Artificial Sequence
  Humanised
DIQMTQSPSSLSASVGDRVTITCKSSQSLLYTSSQKNYLAWYQQKPGKAPKLLIYWASTRESGVPSRFSGSGSGTDFTLTISSLQPEDFATYYCQQYYAYPWTFGQGTKVEIKRTVAAPSVFIFPPSDEQLKSGTASVVCLLNNFYPREAKVQWKVDNALQSGNSQESVTEQDSKDSTYSLSSTLTLSKADYEKHKVYACEVTHQGLSSPVTKSFNRGEC

SEQ ID NO: 201 - protein, 552 aa, Artificial Sequence
  Humanised
EVQLVESGGGLVQPGGSLRLSCAASGYTFTSYWLHWVRQAPGKGLEWVGMIDPSNSDTRFNPNFKDRFTISADTSKNTAYLQMNSLRAEDTAVYYCATYRSYVTPLDYWGQGTLVTVSSASTKGPSVFPLAPCSRSTSESTAALGCLVKDYFPEPVTVSWNSGALTSGVHTFPAVLQSSGLYSLSSVVTVPSSSLGTKTYTCNVDHKPSNTKVDKRVAPEFLGGPSVFLFPPKPKDTLMISRTPEVTCVVVDVSQEDPEVQFNWYVDGVEVHNAKTKPREEQFNSTYRVVSVLTVLHQDWLNGKEYKCKVSNKGLPSSIEKTISKAKGQPREPQVYTLPPSQEEMTKNQVSLTCLVKGFYPSDIAVEWESNGQPENNYKTTPPVLDSDGSFFLYSRLTVDKSRWQEGNVFSCSVMHEALHNHYTQKSLSLSLGKGSEVQLLVSGGGLVQPGGSLRLSCAASGFTFKAYPMMWVRQAPGKGLEWVSEISPSGSYTYYADSVKGRFTISRDNSKNTLYLQMNSLRAEDTAVYYCAKDPRKLDYWGQGTLVTVSS

SEQ ID NO: 202 - protein, 449 aa, Artificial Sequence
  Humanised
EVQLVESGGGLVQPGGSLRLSCAASGYTFTSYWLHWVRQAPGKGLEWVGMIDPSNSDTRFNPNFKDRFTISADTSKNTAYLQMNSLRAEDTAVYYCATYRSYVTPLDYWGQGTLVTVSSASTKGPSVFPLAPSSKSTSGGTAALGCLVKDYFPEPVTVSWNSGALTSGVHTFPAVLQSSGLYSLSSVVTVPSSSLGTQTYICNVNHKPSNTKVDKKVEPKSCDKTHTCPPCPAPELLGGPSVFLFPPKPKDTLMISRTPEVTCVVVDVSHEDPEVKFNWYVDGVEVHNAKTKPREEQYNSTYRVVSVLTVLHQDWLNGKEYKCKVSNKALPAPIEKTISKAKGQPREPQVYTLPPSRDELTKNQVSLSCAVKGFYPSDIAVEWESNGQPENNYKTTPPVLDSDGSFFLVSKLTVDKSRWQQGNVFSCSVMHEALHNHYTQKSLSLSPGK

SEQ ID NO: 203 - protein, 222 aa, Artificial Sequence
  Humanised
CPPCPAPELLGGPSVFLFPPKPKDTLMISRTPEVTCVVVDVSHEDPEVKFNWYVDGVEVHNAKTKPREEQYNSTYRVVSVLTVLHQDWLNGKEYKCKVSNKALPAPIEKTISKAKGQPREPQVYTLPPSRDELTKNQVSLWCLVKGFYPSDIAVEWESNGQPENNYKTTPPVLDSDGSFFLYSKLTVDKSRWQQGNVFSCSVMHEALHNHYTQKSLSLSPGK

SEQ ID NO: 204 - protein, 434 aa, Artificial Sequence
  Humanised
EVQLVESGGGLVQPGGSLRLSCAASGYTFTSYWLHWVRQAPGKGLEWVGMIDPSNSDTRFNPNFKDRFTISADTSKNTAYLQMNSLRAEDTAVYYCATYRSYVTPLDYWGQGTLVTVSSASTKGPSVFPLAPCSRSTSESTAALGCLVKDYFPEPVTVSWNSGALTSGVHTFPAVLQSSGLYSLSSVVTVPSSSLGTKTYTCNVDHKPSNTKVDKRVAPEFLGGPSVFLFPPKPKDTLMISRTPEVTCVVVDVSQEDPEVQFNWYVDGVEVHNAKTKPREEQFNSTYRVVSVLTVLHQDWLNGKEYKCKVSNKGLPSSIEKTISKAKGQPREPQVYTLPPSQEEMTKNQVSLTCLVKGFYPSDIAVEWESNGQPENNYKTTPPVLDSDGSFFLYSRLTVDKSRWQEGNVFSCSVMHEALHNHYTQKSLSLSLGK

SEQ ID NO: 205 - DNA, 1365 bp, Artificial Sequence
  Humanised
caggtgcagctcgtgcagagcggcgccgaagtgaaaaagcccggcagcagcgtgaaggtgagctgcaaggcctccggcttctacatcaaggacacctacatgcactgggtcaggcaggctcctggccagggcctggagtggatgggcactatcgaccccgccaacggcaacaccaagtacgtgcccaagttccagggcagggtgaccatcaccgccgatgagagcaccagcaccgcctacatggaactgagcagcctgaggtctgaggacaccgccgtgtactattgcgccaggagcatctacgacgactaccactacgacgactactacgccatggactactggggacagggcacactagtgaccgtgtccagcgccagcaccaagggccccagcgtgttccccctggcccccagcagcaagagcaccagcggcggcacagccgccctgggctgcctggtgaaggactacttccccgaaccggtgaccgtgtcctggaacagcggagccctgaccagcggcgtgcacaccttccccgccgtgctgcagagcagcggcctgtacagcctgagcagcgtggtgaccgtgcccagcagcagcctgggcacccagacctacatctgtaacgtgaaccacaagcccagcaacaccaaggtggacaagaaggtggagcccaagagctgtgacaagacccacacctgccccccctgccctgcccccgagctgctgggaggccccagcgtgttcctgttcccccccaagcctaaggacaccctgatgatcagcagaacccccgaggtgacctgtgtggtggtggatgtgagccacgaggaccctgaggtgaagttcaactggtacgtggacggcgtggaggtgcacaatgccaagaccaagcccagggaggagcagtacaacagcacctaccgggtggtgtccgtgctgaccgtgctgcaccaggattggctgaacggcaaggagtacaagtgtaaggtgtccaacaaggccctgcctgcccctatcgagaaaaccatcagcaaggccaagggccagcccagagagccccaggtgtacaccctgccccctagcagagatgagctgaccaagaaccaggtgtccctgacctgcctggtgaagggcttctaccccagcgacatcgccgtggagtgggagagcaacggccagcccgagaacaactacaagaccaccccccctgtgctggacagcgatggcagcttcttcctgtacagcaagctgaccgtggacaagagcagatggcagcagggcaacgtgttcagctgctccgtgatgcacgaggccctgcacaatcactacacccagaagagcctgagcctgtcccctggcaag

SEQ ID NO: 206 - DNA, 1365 bp, Artificial Sequence
  Humanised
caggtgcagctggtgcagtctggggctgaggtgaagaagcctgggtcctcggtgaaggtctcctgcaaggcttctggattctacattaaagacacctatatgcactgggtgcgacaggcccctggacaagggcttgagtggatgggaacgattgatcctgcgaatggtaatactaaatatgtcccgaagttccagggcagagtcacgattaccgcggacgaatccacgagcacagcctacatggagctgagcagcctgagatctgaggacacggccgtgtattactgtgcgagaagcatctatgatgattaccactacgacgattactatgctatggactactggggccaagggacactagtcacagtctcctcagcctccaccaagggcccatcggtcttccccctggcaccctcctccaagagcacctctgggggcacagcggccctgggctgcctggtcaaggactacttccccgaaccggtgacggtgtcgtggaactcaggcgccctgaccagcggcgtgcacaccttcccggctgtcctacagtcctcaggactctactccctcagcagcgtggtgaccgtgccctccagcagcttgggcacccagacctacatctgcaacgtgaatcacaagcccagcaacaccaaggtggacaagaaagttgagcccaaatcttgtgacaaaactcacacatgcccaccgtgcccagcacctgaactcctggggggaccgtcagtcttcctcttccccccaaaacccaaggacaccctcatgatctcccggacccctgaggtcacatgcgtggtggtggacgtgagccacgaagaccctgaggtcaagttcaactggtacgtggacggcgtggaggtgcataatgccaagacaaagccgcgggaggagcagtacaacagcacgtaccgtgtggtcagcgtcctcaccgtcctgcaccaggactggctgaatggcaaggagtacaagtgcaaggtctccaacaaagccctcccagcccccatcgagaaaaccatctccaaagccaaagggcagccccgagaaccacaggtgtacaccctgcccccatcccgggatgagctgaccaagaaccaggtcagcctgacctgcctggtcaaaggcttctatcccagcgacatcgccgtggagtgggagagcaatgggcagccggagaacaactacaagaccacgcctcccgtgctggactccgacggctccttcttcctctacagcaagctcaccgtggacaagagcaggtggcagcaggggaacgtcttctcatgctccgtgatgcatgaggctctgcacaaccactacacgcagaagagcctctccctgtctccgggtaaa

SEQ ID NO: 207 - protein, 567 aa, Artificial Sequence
  Humanised
QVTLRESGPALVKPTQTLTLTCTFSGFSLSTSGMGVSWIRQPPGKGLEWLAHIYWDDDKRYNPSLKSRLTISKDTSRNQVVLTMTNMDPVDTATYYCARRETVFYWYFDVWGRGTLVTVSSASTKGPSVFPLAPCSRSTSESTAALGCLVKDYFPEPVTVSWNSGALTSGVHTFPAVLQSSGLYSLSSVVTVPSSNFGTQTYTCNVDHKPSNTKVDKTVERKCCVECPPCPAPPVAGPSVFLFPPKPKDTLMISRTPEVTCVVVDVSHEDPEVQFNWYVDGVEVHNAKTKPREEQFNSTFRVVSVLTVVHQDWLNGKEYKCKVSNKGLPAPIEKTISKTKGQPREPQVYTLPPSREEMTKNQVSLTCLVKGFYPSDIAVEWESNGQPENNYKTTPPMLDSDGSFFLYSKLTVDKSRWQQGNVFSCSVMHEALHNHYTQKSLSLSPGKGSGVQLLESGGGLVQPGGSLRLSCAASGFTFAWYDMGWVRQAPGKGLEWVSSIDWHGEVTYYADSVKGRFTISRDNSKNTLYLQMNSLRAEDTAVYYCATAEDEPGYDYWGQGTLVTVSS

SEQ ID NO: 208 - protein, 568 aa, Artificial Sequence
  Humanised
QVTLRESGPALVKPTQTLTLTCTFSGFSLSTSGMGVSWIRQPPGKGLEWLAHIYWDDDKRYNPSLKSRLTISKDTSRNQVVLTMTNMDPVDTATYYCARRETVFYWYFDVWGRGTLVTVSSASTKGPSVFPLAPCSRSTSESTAALGCLVKDYFPEPVTVSWNSGALTSGVHTFPAVLQSSGLYSLSSVVTVPSSSLGTKTYTCNVDHKPSNTKVDKRVESKYGPPCPSCPAPEFLGGPSVFLFPPKPKDTLMISRTPEVTCVVVDVSQEDPEVQFNWYVDGVEVHNAKTKPREEQFNSTYRVVSVLTVLHQDWLNGKEYKCKVSNKGLPSSIEKTISKAKGQPREPQVYTLPPSQEEMTKNQVSLTCLVKGFYPSDIAVEWESNGQPENNYKTTPPVLDSDGSFFLYSRLTVDKSRWQEGNVFSCSVMHEALHNHYTQKSLSLSLGKGSGVQLLESGGGLVQPGGSLRLSCAASGFTFAWYDMGWVRQAPGKGLEWVSSIDWHGEVTYYADSVKGRFTISRDNSKNTLYLQMNSLRAEDTAVYYCATAEDEPGYDYWGQGTLVTVSS

SEQ ID NO: 209 - protein, 568 aa, Artificial Sequence
  Humanised
QVTLRESGPALVKPTQTLTLTCTFSGFSLSTSGMGVSWIRQPPGKGLEWLAHIYWDDDKRYNPSLKSRLTISKDTSRNQVVLTMTNMDPVDTATYYCARRETVFYWYFDVWGRGTLVTVSSASTKGPSVFPLAPCSRSTSESTAALGCLVKDYFPEPVTVSWNSGALTSGVHTFPAVLQSSGLYSLSSVVTVPSSSLGTKTYTCNVDHKPSNTKVDKRVESKYGPPCPPCPAPEFEGGPSVFLFPPKPKDTLMISRTPEVTCVVVDVSQEDPEVQFNWYVDGVEVHNAKTKPREEQFNSTYRVVSVLTVLHQDWLNGKEYKCKVSNKGLPSSIEKTISKAKGQPREPQVYTLPPSQEEMTKNQVSLTCLVKGFYPSDIAVEWESNGQPENNYKTTPPVLDSDGSFFLYSRLTVDKSRWQEGNVFSCSVMHEALHNHYTQKSLSLSLGKGSGVQLLESGGGLVQPGGSLRLSCAASGFTFAWYDMGWVRQAPGKGLEWVSSIDWHGEVTYYADSVKGRFTISRDNSKNTLYLQMNSLRAEDTAVYYCATAEDEPGYDYWGQGTLVTVSS

SEQ ID NO: 210 - DNA, 657 bp, Artificial Sequence
  Humanised
gacatcgtgatgacccagtctcctctgagcctccccgtgacccccggcgaaccagccagcatctcctgcagaagcagccagaacatcgtgcacatcaacggcaacacctacctggagtggtacctgcaaaagcccggccagagccccaggctgctgatctacaagatcagcgacaggttcagcggcgtgcccgataggttcagcggcagcggcagcggcaccgacttcaccctgaagatcagcagggtggaggccgacgacgtgggcatctactactgcttccagggcagccacgtcccctggactttcggacagggcaccaagctggagattaagcgtacggtggccgcccccagcgtgttcatcttcccccccagcgatgagcagctgaagagcggcaccgccagcgtggtgtgtctgctgaacaacttctacccccgggaggccaaggtgcagtggaaggtggacaatgccctgcagagcggcaacagccaggagagcgtgaccgagcaggacagcaaggactccacctacagcctgagcagcaccctgaccctgagcaaggccgactacgagaagcacaaggtgtacgcctgtgaggtgacccaccagggcctgtccagccccgtgaccaagagcttcaaccggggcgagtgc

SEQ ID NO: 211 - DNA, 1353 bp, Artificial Sequence
  Humanised
caggtgaccctgagggagagcggccccgccctggtgaagcccacccagaccctgaccctgacctgcaccttcagcggctttagcctcagcacctccggcatgggcgtgagctggatcaggcagccacccggcaaaggcctggagtggctggcccacatctactgggacgacgacaagaggtacaaccccagcctgaagagccggctgaccatcagcaaggataccagcaggaaccaggtggtgctgaccatgaccaacatggaccccgtggacaccgctacctactactgcgccaggagggagaccgtcttctactggtacttcgacgtgtggggaaggggcacactagtgaccgtgtccagcgccagcaccaagggccccagcgtgttccccctggcccccagcagcaagagcaccagcggcggcacagccgccctgggctgcctggtgaaggactacttccccgaaccggtgaccgtgtcctggaacagcggagccctgaccagcggcgtgcacaccttccccgccgtgctgcagagcagcggcctgtacagcctgagcagcgtggtgaccgtgcccagcagcagcctgggcacccagacctacatctgtaacgtgaaccacaagcccagcaacaccaaggtggacaagaaggtggagcccaagagctgtgacaagacccacacctgccccccctgccctgcccccgagctgctgggaggccccagcgtgttcctgttcccccccaagcctaaggacaccctgatgatcagcagaacccccgaggtgacctgtgtggtggtggatgtgagccacgaggaccctgaggtgaagttcaactggtacgtggacggcgtggaggtgcacaatgccaagaccaagcccagggaggagcagtacaacagcacctaccgggtggtgtccgtgctgaccgtgctgcaccaggattggctgaacggcaaggagtacaagtgtaaggtgtccaacaaggccctgcctgcccctatcgagaaaaccatcagcaaggccaagggccagcccagagagccccaggtgtacaccctgccccctagcagagatgagctgaccaagaaccaggtgtccctgacctgcctggtgaagggcttctaccccagcgacatcgccgtggagtgggagagcaacggccagcccgagaacaactacaagaccaccccccctgtgctggacagcgatggcagcttcttcctgtacagcaagctgaccgtggacaagagcagatggcagcagggcaacgtgttcagctgctccgtgatgcacgaggccctgcacaatcactacacccagaagagcctgagcctgtcccctggcaag

SEQ ID NO: 212 - DNA, 654 bp, Artificial Sequence
  Humanised
gacatcgtgctgacccagagcccctcttccctgagcgcaagcgtgggcgatagggtgaccatcacctgcaaggccagccagagcgtggactacgacggcgacagctacatgaactggtaccagcagaagcccggcaaggcccccaaactgctgatctacgccgccagcaacctcgagtcaggcattcccagcaggtttagcggcagcggcagcggcaccgacttcaccttcacaatcagcagcctgcagcccgaggacatcgccacctactactgccagcagagcaacgaggaccctcccaccttcggacagggcaccaaggtcgagatcaagcgtacggtggccgcccccagcgtgttcatcttcccccccagcgatgagcagctgaagagcggcaccgccagcgtggtgtgtctgctgaacaacttctacccccgggaggccaaggtgcagtggaaggtggacaatgccctgcagagcggcaacagccaggagagcgtgaccgagcaggacagcaaggactccacctacagcctgagcagcaccctgaccctgagcaaggccgactacgagaagcacaaggtgtacgcctgtgaggtgacccaccagggcctgtccagccccgtgaccaagagcttcaaccggggcgagtgc

SEQ ID NO: 213 - DNA, 1347 bp, Artificial Sequence
  Humanised
caggtgaccctgagggagagcggccccgccctggtgaagcccacacagaccctcactctgacctgcaccgtgagcggcttcagcctgacctcctacagcgtccactgggtgaggcagccccccggcaagggcctggagtggctgggcgtgatctgggcaagcggcggcaccgactacaacagcgccctgatgagcaggctctccatcagcaaggacaccagccggaaccaggtggtgctgaccatgaccaacatggaccccgtggacaccgccacctattactgcgccagggaccctccctctagcctgctgaggctggactactggggcaggggaacactagtgaccgtgtccagcgccagcaccaagggccccagcgtgttccccctggcccccagcagcaagagcaccagcggcggcacagccgccctgggctgcctggtgaaggactacttccccgaaccggtgaccgtgtcctggaacagcggagccctgaccagcggcgtgcacaccttccccgccgtgctgcagagcagcggcctgtacagcctgagcagcgtggtgaccgtgcccagcagcagcctgggcacccagacctacatctgtaacgtgaaccacaagcccagcaacaccaaggtggacaagaaggtggagcccaagagctgtgacaagacccacacctgccccccctgccctgcccccgagctgctgggaggccccagcgtgttcctgttcccccccaagcctaaggacaccctgatgatcagcagaacccccgaggtgacctgtgtggtggtggatgtgagccacgaggaccctgaggtgaagttcaactggtacgtggacggcgtggaggtgcacaatgccaagaccaagcccagggaggagcagtacaacagcacctaccgggtggtgtccgtgctgaccgtgctgcaccaggattggctgaacggcaaggagtacaagtgtaaggtgtccaacaaggccctgcctgcccctatcgagaaaaccatcagcaaggccaagggccagcccagagagccccaggtgtacaccctgccccctagcagagatgagctgaccaagaaccaggtgtccctgacctgcctggtgaagggcttctaccccagcgacatcgccgtggagtgggagagcaacggccagcccgagaacaactacaagaccaccccccctgtgctggacagcgatggcagcttcttcctgtacagcaagctgaccgtggacaagagcagatggcagcagggcaacgtgttcagctgctccgtgatgcacgaggccctgcacaatcactacacccagaagagcctgagcctgtcccctggcaag

SEQ ID NO: 214 - DNA, 660 bp, Artificial Sequence
  Humanised
gacatcgtgatgacccagtctcccgattcactggccgtgagcctgggcgagagggccaccatcaactgcaagagcagccagagcctcctgaacagcggcaaccagaagaactacctggcctggtaccagcagaaacccggccagccccccaagctgctgatctatggcgcctccaccagggagagcggcgtgccagacaggtttagcggcagcggcagcggcaccgacttcaccctgacaatcagcagcctgcaggccgaggacgtggccgtgtactactgccagaacgtccacagcttccccttcaccttcggcgggggaaccaagctggagatcaagcgtacggtggccgcccccagcgtgttcatcttcccccccagcgatgagcagctgaagagcggcaccgccagcgtggtgtgtctgctgaacaacttctacccccgggaggccaaggtgcagtggaaggtggacaatgccctgcagagcggcaacagccaggagagcgtgaccgagcaggacagcaaggactccacctacagcctgagcagcaccctgaccctgagcaaggccgactacgagaagcacaaggtgtacgcctgtgaggtgacccaccagggcctgtccagccccgtgaccaagagcttcaaccggggcgagtgc

SEQ ID NO: 215 - DNA, 1713 bp, Artificial Sequence
  Humanised
caggtgaccctgagggagagcggccccgccctggtgaagcccacccagaccctgaccctgacctgcaccttcagcggctttagcctcagcacctccggcatgggcgtgagctggatcaggcagccacccggcaaaggcctggagtggctggcccacatctactgggacgacgacaagaggtacaaccccagcctgaagagccggctgaccatcagcaaggataccagcaggaaccaggtggtgctgaccatgaccaacatggaccccgtggacaccgctacctactactgcgccaggagggagaccgtcttctactggtacttcgacgtgtggggaaggggcacactagtgaccgtgtccagcgccagcaccaagggccccagcgtgttccccctggcccccagcagcaagagcaccagcggcggcacagccgccctgggctgcctggtgaaggactacttccccgaaccggtgaccgtgtcctggaacagcggagccctgaccagcggcgtgcacaccttccccgccgtgctgcagagcagcggcctgtacagcctgagcagcgtggtgaccgtgcccagcagcagcctgggcacccagacctacatctgtaacgtgaaccacaagcccagcaacaccaaggtggacaagaaggtggagcccaagagctgtgacaagacccacacctgccccccctgccctgcccccgagctgctgggaggccccagcgtgttcctgttcccccccaagcctaaggacaccctgatgatcagcagaacccccgaggtgacctgtgtggtggtggatgtgagccacgaggaccctgaggtgaagttcaactggtacgtggacggcgtggaggtgcacaatgccaagaccaagcccagggaggagcagtacaacagcacctaccgggtggtgtccgtgctgaccgtgctgcaccaggattggctgaacggcaaggagtacaagtgtaaggtgtccaacaaggccctgcctgcccctatcgagaaaaccatcagcaaggccaagggccagcccagagagccccaggtgtacaccctgccccctagcagagatgagctgaccaagaaccaggtgtccctgacctgcctggtgaagggcttctaccccagcgacatcgccgtggagtgggagagcaacggccagcccgagaacaactacaagaccaccccccctgtgctggacagcgatggcagcttcttcctgtacagcaagctgaccgtggacaagagcagatggcagcagggcaacgtgttcagctgctccgtgatgcacgaggccctgcacaatcactacacccagaagagcctgagcctgtcccctggcaagggatccggcgtgcagctcctggagagcggcggaggcctggtccagcccggcggcagcctgaggctgagctgcgccgccagcggcttcaccttcgcctggtatgatatgggctgggtgaggcaggcccccggcaagggcctggagtgggtgtccagcatcgactggcacggggaggtgacctactacgccgacagcgtgaagggcaggttcaccatcagcagggacaacagcaagaacaccctgtacctgcagatgaacagcctgagggccgaggacaccgcagtgtactactgcgccaccgccgaggacgaacccggctacgactactggggccagggcaccctggtgactgtgagcagc

SEQ ID NO: 216 - DNA, 1731 bp, Artificial Sequence
  Humanised
caggtgaccctgagggagagcggccccgccctggtgaagcccacccagaccctgaccctgacctgcaccttcagcggctttagcctcagcacctccggcatgggcgtgagctggatcaggcagccacccggcaaaggcctggagtggctggcccacatctactgggacgacgacaagaggtacaaccccagcctgaagagccggctgaccatcagcaaggataccagcaggaaccaggtggtgctgaccatgaccaacatggaccccgtggacaccgctacctactactgcgccaggagggagaccgtcttctactggtacttcgacgtgtggggaaggggcacactagtgaccgtgtccagcgccagcaccaagggccccagcgtgttccccctggcccccagcagcaagagcaccagcggcggcacagccgccctgggctgcctggtgaaggactacttccccgaaccggtgaccgtgtcctggaacagcggagccctgaccagcggcgtgcacaccttccccgccgtgctgcagagcagcggcctgtacagcctgagcagcgtggtgaccgtgcccagcagcagcctgggcacccagacctacatctgtaacgtgaaccacaagcccagcaacaccaaggtggacaagaaggtggagcccaagagctgtgacaagacccacacctgccccccctgccctgcccccgagctgctgggaggccccagcgtgttcctgttcccccccaagcctaaggacaccctgatgatcagcagaacccccgaggtgacctgtgtggtggtggatgtgagccacgaggaccctgaggtgaagttcaactggtacgtggacggcgtggaggtgcacaatgccaagaccaagcccagggaggagcagtacaacagcacctaccgggtggtgtccgtgctgaccgtgctgcaccaggattggctgaacggcaaggagtacaagtgtaaggtgtccaacaaggccctgcctgcccctatcgagaaaaccatcagcaaggccaagggccagcccagagagccccaggtgtacaccctgccccctagcagagatgagctgaccaagaaccaggtgtccctgacctgcctggtgaagggcttctaccccagcgacatcgccgtggagtgggagagcaacggccagcccgagaacaactacaagaccaccccccctgtgctggacagcgatggcagcttcttcctgtacagcaagctgaccgtggacaagagcagatggcagcagggcaacgtgttcagctgctccgtgatgcacgaggccctgcacaatcactacacccagaagagcctgagcctgtcccctggcaagaccgtggccgccccctcgggatccggcgtgcagctcctggagagcggcggaggcctggtccagcccggcggcagcctgaggctgagctgcgccgccagcggcttcaccttcgcctggtatgatatgggctgggtgaggcaggcccccggcaagggcctggagtgggtgtccagcatcgactggcacggggaggtgacctactacgccgacagcgtgaagggcaggttcaccatcagcagggacaacagcaagaacaccctgtacctgcagatgaacagcctgagggccgaggacaccgcagtgtactactgcgccaccgccgaggacgaacccggctacgactactggggccagggcaccctggtgactgtgagcagc

SEQ ID NO: 217 - DNA, 1014 bp, Artificial Sequence
  Humanised
gacatcgtgctgacccagagcccctcttccctgagcgcaagcgtgggcgatagggtgaccatcacctgcaaggccagccagagcgtggactacgacggcgacagctacatgaactggtaccagcagaagcccggcaaggcccccaaactgctgatctacgccgccagcaacctcgagtcaggcattcccagcaggtttagcggcagcggcagcggcaccgacttcaccttcacaatcagcagcctgcagcccgaggacatcgccacctactactgccagcagagcaacgaggaccctcccaccttcggacagggcaccaaggtcgagatcaagcgtacggtggccgcccccagcgtgttcatcttcccccccagcgatgagcagctgaagagcggcaccgccagcgtggtgtgtctgctgaacaacttctacccccgggaggccaaggtgcagtggaaggtggacaatgccctgcagagcggcaacagccaggagagcgtgaccgagcaggacagcaaggactccacctacagcctgagcagcaccctgaccctgagcaaggccgactacgagaagcacaaggtgtacgcctgtgaggtgacccaccagggcctgtccagccccgtgaccaagagcttcaaccggggcgagtgtggatccggcgtgcagctcctggagagcggcggaggcctggtccagcccggcggcagcctgaggctgagctgcgccgccagcggcttcaccttcgcctggtatgatatgggctgggtgaggcaggcccccggcaagggcctggagtgggtgtccagcatcgactggcacggggaggtgacctactacgccgacagcgtgaagggcaggttcaccatcagcagggacaacagcaagaacaccctgtacctgcagatgaacagcctgagggccgaggacaccgcagtgtactactgcgccaccgccgaggacgaacccggctacgactactggggccagggcaccctggtgactgtgagcagc

SEQ ID NO: 218 - DNA, 1032 bp, Artificial Sequence
  Humanised
gacatcgtgctgacccagagcccctcttccctgagcgcaagcgtgggcgatagggtgaccatcacctgcaaggccagccagagcgtggactacgacggcgacagctacatgaactggtaccagcagaagcccggcaaggcccccaaactgctgatctacgccgccagcaacctcgagtcaggcattcccagcaggtttagcggcagcggcagcggcaccgacttcaccttcacaatcagcagcctgcagcccgaggacatcgccacctactactgccagcagagcaacgaggaccctcccaccttcggacagggcaccaaggtcgagatcaagcgtacggtggccgcccccagcgtgttcatcttcccccccagcgatgagcagctgaagagcggcaccgccagcgtggtgtgtctgctgaacaacttctacccccgggaggccaaggtgcagtggaaggtggacaatgccctgcagagcggcaacagccaggagagcgtgaccgagcaggacagcaaggactccacctacagcctgagcagcaccctgaccctgagcaaggccgactacgagaagcacaaggtgtacgcctgtgaggtgacccaccagggcctgtccagccccgtgaccaagagcttcaaccggggcgagtgcaccgtggccgccccctcgggatccggcgtgcagctcctggagagcggcggaggcctggtccagcccggcggcagcctgaggctgagctgcgccgccagcggcttcaccttcgcctggtatgatatgggctgggtgaggcaggcccccggcaagggcctggagtgggtgtccagcatcgactggcacggggaggtgacctactacgccgacagcgtgaagggcaggttcaccatcagcagggacaacagcaagaacaccctgtacctgcagatgaacagcctgagggccgaggacaccgcagtgtactactgcgccaccgccgaggacgaacccggctacgactactggggccagggcaccctggtgactgtgagcagc

SEQ ID NO: 219 - DNA, 1710 bp, Artificial Sequence
  Humanised
caggtgaccctgagggagagcggccccgccctggtgaagcccacacagaccctcactctgacctgcaccgtgagcggcttcagcctgacctcctacagcgtccactgggtgaggcagccccccggcaagggcctggagtggctgggcgtgatctgggcaagcggcggcaccgactacaacagcgccctgatgagcaggctctccatcagcaaggacaccagccggaaccaggtggtgctgaccatgaccaacatggaccccgtggacaccgccacctattactgcgccagggaccctccctctagcctgctgaggctggactactggggcaggggaacactagtgaccgtgtccagcgccagcaccaagggccccagcgtgttccccctggcccccagcagcaagagcaccagcggcggcacagccgccctgggctgcctggtgaaggactacttccccgaaccggtgaccgtgtcctggaacagcggagccctgaccagcggcgtgcacaccttccccgccgtgctgcagagcagcggcctgtacagcctgagcagcgtggtgaccgtgcccagcagcagcctgggcacccagacctacatctgtaacgtgaaccacaagcccagcaacaccaaggtggacaagaaggtggagcccaagagctgtgacaagacccacacctgccccccctgccctgcccccgagctgctgggaggccccagcgtgttcctgttcccccccaagcctaaggacaccctgatgatcagcagaacccccgaggtgacctgtgtggtggtggatgtgagccacgaggaccctgaggtgaagttcaactggtacgtggacggcgtggaggtgcacaatgccaagaccaagcccagggaggagcagtacaacagcacctaccgggtggtgtccgtgctgaccgtgctgcaccaggattggctgaacggcaaggagtacaagtgtaaggtgtccaacaaggccctgcctgcccctatcgagaaaaccatcagcaaggccaagggccagcccagagagccccaggtgtacaccctgccccctagcagagatgagctgaccaagaaccaggtgtccctgacctgcctggtgaagggcttctaccccagcgacatcgccgtggagtgggagagcaacggccagcccgagaacaactacaagaccaccccccctgtgctggacagcgatggcagcttcttcctgtacagcaagctgaccgtggacaagagcagatggcagcagggcaacgtgttcagctgctccgtgatgcacgaggccctgcacaatcactacacccagaagagcctgagcctgtcccctggcaagggcggcggcggatccgaagtgcagctcctggagagcggcggcggcctggtgcagcccggcggcagcctgaggctgagctgcgccgctagcggcttcaccttcaggaacttcggcatgggctgggtcaggcaggcccccggcaagggcctggagtgggtcagctggatcatcagctccggcaccgagacctactacgccgacagcgtgaagggcaggttcaccatcagccgcgacaacagcaagaacaccctgtacctgcagatgaacagcctgagggccgaggacaccgccgtctactactgcgccaagagcctgggcaggttcgactactggggacaggggaccctggtgactgtgagcagc

SEQ ID NO: 220 - DNA, 1029 bp, Artificial Sequence
  Humanised
gacatcgtgatgacccagtctcccgattcactggccgtgagcctgggcgagagggccaccatcaactgcaagagcagccagagcctcctgaacagcggcaaccagaagaactacctggcctggtaccagcagaaacccggccagccccccaagctgctgatctatggcgcctccaccagggagagcggcgtgccagacaggtttagcggcagcggcagcggcaccgacttcaccctgacaatcagcagcctgcaggccgaggacgtggccgtgtactactgccagaacgtccacagcttccccttcaccttcggcgggggaaccaagctggagatcaagcgtacggtggccgcccccagcgtgttcatcttcccccccagcgatgagcagctgaagagcggcaccgccagcgtggtgtgtctgctgaacaacttctacccccgggaggccaaggtgcagtggaaggtggacaatgccctgcagagcggcaacagccaggagagcgtgaccgagcaggacagcaaggactccacctacagcctgagcagcaccctgaccctgagcaaggccgactacgagaagcacaaggtgtacgcctgtgaggtgacccaccagggcctgtccagccccgtgaccaagagcttcaaccggggcgagtgcggcggcggcggatccggcgtgcagctcctggagagcggcggaggcctggtccagcccggcggcagcctgaggctgagctgcgccgccagcggcttcaccttcgcctggtatgatatgggctgggtgaggcaggcccccggcaagggcctggagtgggtgtccagcatcgactggcacggggaggtgacctactacgccgacagcgtgaagggcaggttcaccatcagcagggacaacagcaagaacaccctgtacctgcagatgaacagcctgagggccgaggacaccgcagtgtactactgcgccaccgccgaggacgaacccggctacgactactggggccagggcaccctggtgactgtgagcagc

SEQ ID NO: 221 - DNA, 1713 bp, Artificial Sequence
  Humanised
caggtgcagctcgtgcagagcggcgccgaagtgaaaaagcccggcagcagcgtgaaggtgagctgcaaggcctccggcttctacatcaaggacacctacatgcactgggtcaggcaggctcctggccagggcctggagtggatgggcactatcgaccccgccaacggcaacaccaagtacgtgcccaagttccagggcagggtgaccatcaccgccgatgagagcaccagcaccgcctacatggaactgagcagcctgaggtctgaggacaccgccgtgtactattgcgccaggagcatctacgacgactaccactacgacgactactacgccatggactactggggacagggcacactagtgaccgtgtccagcgccagcaccaagggccccagcgtgttccccctggcccccagcagcaagagcaccagcggcggcacagccgccctgggctgcctggtgaaggactacttccccgaaccggtgaccgtgtcctggaacagcggagccctgaccagcggcgtgcacaccttccccgccgtgctgcagagcagcggcctgtacagcctgagcagcgtggtgaccgtgcccagcagcagcctgggcacccagacctacatctgtaacgtgaaccacaagcccagcaacaccaaggtggacaagaaggtggagcccaagagctgtgacaagacccacacctgccccccctgccctgcccccgagctgctgggaggccccagcgtgttcctgttcccccccaagcctaaggacaccctgatgatcagcagaacccccgaggtgacctgtgtggtggtggatgtgagccacgaggaccctgaggtgaagttcaactggtacgtggacggcgtggaggtgcacaatgccaagaccaagcccagggaggagcagtacaacagcacctaccgggtggtgtccgtgctgaccgtgctgcaccaggattggctgaacggcaaggagtacaagtgtaaggtgtccaacaaggccctgcctgcccctatcgagaaaaccatcagcaaggccaagggccagcccagagagccccaggtgtacaccctgccccctagcagagatgagctgaccaagaaccaggtgtccctgacctgcctggtgaagggcttctaccccagcgacatcgccgtggagtgggagagcaacggccagcccgagaacaactacaagaccaccccccctgtgctggacagcgatggcagcttcttcctgtacagcaagctgaccgtggacaagagcagatggcagcagggcaacgtgttcagctgctccgtgatgcacgaggccctgcacaatcactacacccagaagagcctgagcctgtcccctggcaaggaagtgcagctcctggagagcggcggcggcctggtgcagcccggcggcagcctgaggctgagctgcgccgctagcggcttcaccttcaggaacttcggcatgggctgggtcaggcaggcccccggcaagggcctggagtgggtcagctggatcatcagctccggcaccgagacctactacgccgacagcgtgaagggcaggttcaccatcagccgcgacaacagcaagaacaccctgtacctgcagatgaacagcctgagggccgaggacaccgccgtctactactgcgccaagagcctgggcaggttcgactactggggacaggggaccctggtgactgtgagcagc

SEQ ID NO: 222 - DNA, 1731 bp, Artificial Sequence
  Humanised
caggtgcagctcgtgcagagcggcgccgaagtgaaaaagcccggcagcagcgtgaaggtgagctgcaaggcctccggcttctacatcaaggacacctacatgcactgggtcaggcaggctcctggccagggcctggagtggatgggcactatcgaccccgccaacggcaacaccaagtacgtgcccaagttccagggcagggtgaccatcaccgccgatgagagcaccagcaccgcctacatggaactgagcagcctgaggtctgaggacaccgccgtgtactattgcgccaggagcatctacgacgactaccactacgacgactactacgccatggactactggggacagggcacactagtgaccgtgtctagcgccagcaccaagggccccagcgtgttccccctggcccccagcagcaagagcaccagcggcggcacagccgccctgggctgcctggtgaaggactacttccccgaaccggtgaccgtgtcctggaacagcggagccctgaccagcggcgtgcacaccttccccgccgtgctgcagagcagcggcctgtacagcctgagcagcgtggtgaccgtgcccagcagcagcctgggcacccagacctacatctgtaacgtgaaccacaagcccagcaacaccaaggtggacaagaaggtggagcccaagagctgtgacaagacccacacctgccccccctgccctgcccccgagctgctgggaggccccagcgtgttcctgttcccccccaagcctaaggacaccctgatgatcagcagaacccccgaggtgacctgtgtggtggtggatgtgagccacgaggaccctgaggtgaagttcaactggtacgtggacggcgtggaggtgcacaatgccaagaccaagcccagggaggagcagtacaacagcacctaccgggtggtgtccgtgctgaccgtgctgcaccaggattggctgaacggcaaggagtacaagtgtaaggtgtccaacaaggccctgcctgcccctatcgagaaaaccatcagcaaggccaagggccagcccagagagccccaggtgtacaccctgccccctagcagagatgagctgaccaagaaccaggtgtccctgacctgcctggtgaagggcttctaccccagcgacatcgccgtggagtgggagagcaacggccagcccgagaacaactacaagaccaccccccctgtgctggacagcgatggcagcttcttcctgtacagcaagctgaccgtggacaagagcagatggcagcagggcaacgtgttcagctgctccgtgatgcacgaggccctgcacaatcactacacccagaagagcctgagcctgtcccctggcaagaccgtggccgccccctcggaagtgcagctcctggagagcggcggcggcctggtgcagcccggcggcagcctgaggctgagctgcgccgctagcggcttcaccttcaggaacttcggcatgggctgggtcaggcaggcccccggcaagggcctggagtgggtcagctggatcatcagctccggcaccgagacctactacgccgacagcgtgaagggcaggttcaccatcagccgcgacaacagcaagaacaccctgtacctgcagatgaacagcctgagggccgaggacaccgccgtctactactgcgccaagagcctgggcaggttcgactactggggacaggggaccctggtgactgtgagcagc

SEQ ID NO: 223 - DNA, 1707 bp, Artificial Sequence
  Humanised
caggtgaccctgagggagagcggccccgccctggtgaagcccacccagaccctgaccctgacctgcaccttcagcggctttagcctcagcacctccggcatgggcgtgagctggatcaggcagccacccggcaaaggcctggagtggctggcccacatctactgggacgacgacaagaggtacaaccccagcctgaagagccggctgaccatcagcaaggataccagcaggaaccaggtggtgctgaccatgaccaacatggaccccgtggacaccgctacctactactgcgccaggagggagaccgtcttctactggtacttcgacgtgtggggaaggggcacactagtgaccgtgtccagcgccagcaccaagggccccagcgtgttccccctggcccccagcagcaagagcaccagcggcggcacagccgccctgggctgcctggtgaaggactacttccccgaaccggtgaccgtgtcctggaacagcggagccctgaccagcggcgtgcacaccttccccgccgtgctgcagagcagcggcctgtacagcctgagcagcgtggtgaccgtgcccagcagcagcctgggcacccagacctacatctgtaacgtgaaccacaagcccagcaacaccaaggtggacaagaaggtggagcccaagagctgtgacaagacccacacctgccccccctgccctgcccccgagctgctgggaggccccagcgtgttcctgttcccccccaagcctaaggacaccctgatgatcagcagaacccccgaggtgacctgtgtggtggtggatgtgagccacgaggaccctgaggtgaagttcaactggtacgtggacggcgtggaggtgcacaatgccaagaccaagcccagggaggagcagtacaacagcacctaccgggtggtgtccgtgctgaccgtgctgcaccaggattggctgaacggcaaggagtacaagtgtaaggtgtccaacaaggccctgcctgcccctatcgagaaaaccatcagcaaggccaagggccagcccagagagccccaggtgtacaccctgccccctagcagagatgagctgaccaagaaccaggtgtccctgacctgcctggtgaagggcttctaccccagcgacatcgccgtggagtgggagagcaacggccagcccgagaacaactacaagaccaccccccctgtgctggacagcgatggcagcttcttcctgtacagcaagctgaccgtggacaagagcagatggcagcagggcaacgtgttcagctgctccgtgatgcacgaggccctgcacaatcactacacccagaagagcctgagcctgtcccctggcaagggcgtgcagctcctggagagcggcggaggcctggtccagcccggcggcagcctgaggctgagctgcgccgccagcggcttcaccttcgcctggtatgatatgggctgggtgaggcaggcccccggcaagggcctggagtgggtgtccagcatcgactggcacggggaggtgacctactacgccgacagcgtgaagggcaggttcaccatcagcagggacaacagcaagaacaccctgtacctgcagatgaacagcctgagggccgaggacaccgcagtgtactactgcgccaccgccgaggacgaacccggctacgactactggggccagggcaccctggtgactgtgagcagc

SEQ ID NO: 224 - DNA, 1725 bp, Artificial Sequence
  Humanised
caggtgaccctgagggagagcggccccgccctggtgaagcccacccagaccctgaccctgacctgcaccttcagcggctttagcctcagcacctccggcatgggcgtgagctggatcaggcagccacccggcaaaggcctggagtggctggcccacatctactgggacgacgacaagaggtacaaccccagcctgaagagccggctgaccatcagcaaggataccagcaggaaccaggtggtgctgaccatgaccaacatggaccccgtggacaccgctacctactactgcgccaggagggagaccgtcttctactggtacttcgacgtgtggggaaggggcacactagtgaccgtgtccagcgccagcaccaagggccccagcgtgttccccctggcccccagcagcaagagcaccagcggcggcacagccgccctgggctgcctggtgaaggactacttccccgaaccggtgaccgtgtcctggaacagcggagccctgaccagcggcgtgcacaccttccccgccgtgctgcagagcagcggcctgtacagcctgagcagcgtggtgaccgtgcccagcagcagcctgggcacccagacctacatctgtaacgtgaaccacaagcccagcaacaccaaggtggacaagaaggtggagcccaagagctgtgacaagacccacacctgccccccctgccctgcccccgagctgctgggaggccccagcgtgttcctgttcccccccaagcctaaggacaccctgatgatcagcagaacccccgaggtgacctgtgtggtggtggatgtgagccacgaggaccctgaggtgaagttcaactggtacgtggacggcgtggaggtgcacaatgccaagaccaagcccagggaggagcagtacaacagcacctaccgggtggtgtccgtgctgaccgtgctgcaccaggattggctgaacggcaaggagtacaagtgtaaggtgtccaacaaggccctgcctgcccctatcgagaaaaccatcagcaaggccaagggccagcccagagagccccaggtgtacaccctgccccctagcagagatgagctgaccaagaaccaggtgtccctgacctgcctggtgaagggcttctaccccagcgacatcgccgtggagtgggagagcaacggccagcccgagaacaactacaagaccaccccccctgtgctggacagcgatggcagcttcttcctgtacagcaagctgaccgtggacaagagcagatggcagcagggcaacgtgttcagctgctccgtgatgcacgaggccctgcacaatcactacacccagaagagcctgagcctgtcccctggcaagaccgtggccgccccctcgggcgtgcagctcctggagagcggcggaggcctggtccagcccggcggcagcctgaggctgagctgcgccgccagcggcttcaccttcgcctggtatgatatgggctgggtgaggcaggcccccggcaagggcctggagtgggtgtccagcatcgactggcacggggaggtgacctactacgccgacagcgtgaagggcaggttcaccatcagcagggacaacagcaagaacaccctgtacctgcagatgaacagcctgagggccgaggacaccgcagtgtactactgcgccaccgccgaggacgaacccggctacgactactggggccagggcaccctggtgactgtgagcagc

SEQ ID NO: 225 - DNA, 1734 bp, Artificial Sequence
  Humanised
caggtgaccctgagggagagcggccccgccctggtgaagcccacccagaccctgaccctgacctgcaccttcagcggctttagcctcagcacctccggcatgggcgtgagctggatcaggcagccacccggcaaaggcctggagtggctggcccacatctactgggacgacgacaagaggtacaaccccagcctgaagagccggctgaccatcagcaaggataccagcaggaaccaggtggtgctgaccatgaccaacatggaccccgtggacaccgctacctactactgcgccaggagggagaccgtcttctactggtacttcgacgtgtggggaaggggcacactagtgaccgtgtccagcgccagcaccaagggccccagcgtgttccccctggcccccagcagcaagagcaccagcggcggcacagccgccctgggctgcctggtgaaggactacttccccgaaccggtgaccgtgtcctggaacagcggagccctgaccagcggcgtgcacaccttccccgccgtgctgcagagcagcggcctgtacagcctgagcagcgtggtgaccgtgcccagcagcagcctgggcacccagacctacatctgtaacgtgaaccacaagcccagcaacaccaaggtggacaagaaggtggagcccaagagctgtgacaagacccacacctgccccccctgccctgcccccgagctgctgggaggccccagcgtgttcctgttcccccccaagcctaaggacaccctgatgatcagcagaacccccgaggtgacctgtgtggtggtggatgtgagccacgaggaccctgaggtgaagttcaactggtacgtggacggcgtggaggtgcacaatgccaagaccaagcccagggaggagcagtacaacagcacctaccgggtggtgtccgtgctgaccgtgctgcaccaggattggctgaacggcaaggagtacaagtgtaaggtgtccaacaaggccctgcctgcccctatcgagaaaaccatcagcaaggccaagggccagcccagagagccccaggtgtacaccctgccccctagcagagatgagctgaccaagaaccaggtgtccctgacctgcctggtgaagggcttctaccccagcgacatcgccgtggagtgggagagcaacggccagcccgagaacaactacaagaccaccccccctgtgctggacagcgatggcagcttcttcctgtacagcaagctgaccgtggacaagagcagatggcagcagggcaacgtgttcagctgctccgtgatgcacgaggccctgcacaatcactacacccagaagagcctgagcctgtcccctggcaagggatcagccagcaccaagggccccacgggcgtgcagctcctggagagcggcggaggcctggtccagcccggcggcagcctgaggctgagctgcgccgccagcggcttcaccttcgcctggtatgatatgggctgggtgaggcaggcccccggcaagggcctggagtgggtgtccagcatcgactggcacggggaggtgacctactacgccgacagcgtgaagggcaggttcaccatcagcagggacaacagcaagaacaccctgtacctgcagatgaacagcctgagggccgaggacaccgcagtgtactactgcgccaccgccgaggacgaacccggctacgactactggggccagggcaccctggtgactgtgagcagc

SEQ ID NO: 226 - DNA, 1731 bp, Artificial Sequence
  Humanised
caggtgcagctggtgcagagcggagccgaggtgaagaagcctggcgccagcgtcaaggtgtcctgcaaggccagcggctacaccttcaccgactactacatgaactgggtgcggcaggccccaggccagggactggaatggatgggcaacatcaaccccaacaacggcggcaccaactacaaccagaagttcaaggaccgggtcaccatgaccaccgacaccagcaccagcaccgcctacatggaactgcggagcctgagaagcgacgacaccgccgtgtactactgcgcccggtggatcctgtactacggccggtccaagtggtacttcgacgtgtggggcaggggcacactagtgaccgtgtccagcgccagcaccaagggccccagcgtgttccccctggcccccagcagcaagagcaccagcggcggcacagccgccctgggctgcctggtgaaggactacttccccgaaccggtgaccgtgtcctggaacagcggagccctgaccagcggcgtgcacaccttccccgccgtgctgcagagcagcggcctgtacagcctgagcagcgtggtgaccgtgcccagcagcagcctgggcacccagacctacatctgtaacgtgaaccacaagcccagcaacaccaaggtggacaagaaggtggagcccaagagctgtgacaagacccacacctgccccccctgccctgcccccgagctgctgggaggccccagcgtgttcctgttcccccccaagcctaaggacaccctgatgatcagcagaacccccgaggtgacctgtgtggtggtggatgtgagccacgaggaccctgaggtgaagttcaactggtacgtggacggcgtggaggtgcacaatgccaagaccaagcccagggaggagcagtacaacagcacctaccgggtggtgtccgtgctgaccgtgctgcaccaggattggctgaacggcaaggagtacaagtgtaaggtgtccaacaaggccctgcctgcccctatcgagaaaaccatcagcaaggccaagggccagcccagagagccccaggtgtacaccctgccccctagcagagatgagctgaccaagaaccaggtgtccctgacctgcctggtgaagggcttctaccccagcgacatcgccgtggagtgggagagcaacggccagcccgagaacaactacaagaccaccccccctgtgctggacagcgatggcagcttcttcctgtacagcaagctgaccgtggacaagagcagatggcagcagggcaacgtgttcagctgctccgtgatgcacgaggccctgcacaatcactacacccagaagagcctgagcctgtcccctggcaagaccgtggccgccccctcgggatccgaggtgcagctcctggtcagcggcggcggcctggtccagcccggaggctcactgaggctgagctgcgccgctagcggcttcaccttcaaggcctaccccatgatgtgggtcaggcaggcccccggcaaaggcctggagtgggtgtctgagatcagccccagcggcagctacacctactacgccgacagcgtgaagggcaggttcaccatcagcagggacaacagcaagaacaccctgtacctgcagatgaactctctgagggccgaggacaccgccgtgtactactgcgccaaggaccccaggaagctggactattggggccagggcactctggtgaccgtgagcagc

SEQ ID NO: 227 - DNA, 1713 bp, Artificial Sequence
  Humanised
caggtgcagctggtgcagagcggagccgaggtgaagaagcctggcgccagcgtcaaggtgtcctgcaaggccagcggctacaccttcaccgactactacatgaactgggtgcggcaggccccaggccagggactggaatggatgggcaacatcaaccccaacaacggcggcaccaactacaaccagaagttcaaggaccgggtcaccatgaccaccgacaccagcaccagcaccgcctacatggaactgcggagcctgagaagcgacgacaccgccgtgtactactgcgcccggtggatcctgtactacggccggtccaagtggtacttcgacgtgtggggcaggggcacactagtgaccgtgtccagcgccagcaccaagggccccagcgtgttccccctggcccccagcagcaagagcaccagcggcggcacagccgccctgggctgcctggtgaaggactacttccccgaaccggtgaccgtgtcctggaacagcggagccctgaccagcggcgtgcacaccttccccgccgtgctgcagagcagcggcctgtacagcctgagcagcgtggtgaccgtgcccagcagcagcctgggcacccagacctacatctgtaacgtgaaccacaagcccagcaacaccaaggtggacaagaaggtggagcccaagagctgtgacaagacccacacctgccccccctgccctgcccccgagctgctgggaggccccagcgtgttcctgttcccccccaagcctaaggacaccctgatgatcagcagaacccccgaggtgacctgtgtggtggtggatgtgagccacgaggaccctgaggtgaagttcaactggtacgtggacggcgtggaggtgcacaatgccaagaccaagcccagggaggagcagtacaacagcacctaccgggtggtgtccgtgctgaccgtgctgcaccaggattggctgaacggcaaggagtacaagtgtaaggtgtccaacaaggccctgcctgcccctatcgagaaaaccatcagcaaggccaagggccagcccagagagccccaggtgtacaccctgccccctagcagagatgagctgaccaagaaccaggtgtccctgacctgcctggtgaagggcttctaccccagcgacatcgccgtggagtgggagagcaacggccagcccgagaacaactacaagaccaccccccctgtgctggacagcgatggcagcttcttcctgtacagcaagctgaccgtggacaagagcagatggcagcagggcaacgtgttcagctgctccgtgatgcacgaggccctgcacaatcactacacccagaagagcctgagcctgtcccctggcaagggatccgaggtgcagctcctggtcagcggcggcggcctggtccagcccggaggctcactgaggctgagctgcgccgctagcggcttcaccttcaaggcctaccccatgatgtgggtcaggcaggcccccggcaaaggcctggagtgggtgtctgagatcagccccagcggcagctacacctactacgccgacagcgtgaagggcaggttcaccatcagcagggacaacagcaagaacaccctgtacctgcagatgaactctctgagggccgaggacaccgccgtgtactactgcgccaaggaccccaggaagctggactattggggccagggcactctggtgaccgtgagcagc

SEQ ID NO: 228 - DNA, 1359 bp, Artificial Sequence
  Humanised
caggtgcagctggtgcagagcggagccgaggtgaagaagcctggcgccagcgtcaaggtgtcctgcaaggccagcggctacaccttcaccgactactacatgaactgggtgcggcaggccccaggccagggactggaatggatgggcaacatcaaccccaacaacggcggcaccaactacaaccagaagttcaaggaccgggtcaccatgaccaccgacaccagcaccagcaccgcctacatggaactgcggagcctgagaagcgacgacaccgccgtgtactactgcgcccggtggatcctgtactacggccggtccaagtggtacttcgacgtgtggggcaggggcacactagtgaccgtgtccagcgccagcaccaagggccccagcgtgttccccctggcccccagcagcaagagcaccagcggcggcacagccgccctgggctgcctggtgaaggactacttccccgaaccggtgaccgtgtcctggaacagcggagccctgaccagcggcgtgcacaccttccccgccgtgctgcagagcagcggcctgtacagcctgagcagcgtggtgaccgtgcccagcagcagcctgggcacccagacctacatctgtaacgtgaaccacaagcccagcaacaccaaggtggacaagaaggtggagcccaagagctgtgacaagacccacacctgccccccctgccctgcccccgagctgctgggaggccccagcgtgttcctgttcccccccaagcctaaggacaccctgatgatcagcagaacccccgaggtgacctgtgtggtggtggatgtgagccacgaggaccctgaggtgaagttcaactggtacgtggacggcgtggaggtgcacaatgccaagaccaagcccagggaggagcagtacaacagcacctaccgggtggtgtccgtgctgaccgtgctgcaccaggattggctgaacggcaaggagtacaagtgtaaggtgtccaacaaggccctgcctgcccctatcgagaaaaccatcagcaaggccaagggccagcccagagagccccaggtgtacaccctgccccctagcagagatgagctgaccaagaaccaggtgtccctgacctgcctggtgaagggcttctaccccagcgacatcgccgtggagtgggagagcaacggccagcccgagaacaactacaagaccaccccccctgtgctggacagcgatggcagcttcttcctgtacagcaagctgaccgtggacaagagcagatggcagcagggcaacgtgttcagctgctccgtgatgcacgaggccctgcacaatcactacacccagaagagcctgagcctgtcccctggcaag

SEQ ID NO: 229 - DNA, 1029 bp, Artificial Sequence
  Humanised
gacatcgtgatgacccagagccccctgagcctgcccgtgacccctggcgagcccgccagcatcagctgcagaagcagccagagcatcgtccagagcaacggcgacacctacctggaatggtatctgcagaagcccggccagtccccccagctgctgatctacagagtgagcaaccggttcagcggcgtgcccgacagattcagcggcagcggctccggcaccgacttcaccctgaagatcagccgggtggaggccgaggacgtgggcgtgtactactgctttcaaggcagccacgtgccctacaccttcggccagggcaccaagctggaaatcaagcgtacggtggccgcccccagcgtgttcatcttcccccccagcgatgagcagctgaagagcggcaccgccagcgtggtgtgtctgctgaacaacttctacccccgggaggccaaggtgcagtggaaggtggacaatgccctgcagagcggcaacagccaggagagcgtgaccgagcaggacagcaaggactccacctacagcctgagcagcaccctgaccctgagcaaggccgactacgagaagcacaaggtgtacgcctgtgaggtgacccaccagggcctgtccagccccgtgaccaagagcttcaaccggggcgagtgcaccgtggccgccccctcgggatccgaggtgcagctcctggtcagcggcggcggcctggtccagcccggaggctcactgaggctgagctgcgccgctagcggcttcaccttcaaggcctaccccatgatgtgggtcaggcaggcccccggcaaaggcctggagtgggtgtctgagatcagccccagcggcagctacacctactacgccgacagcgtgaagggcaggttcaccatcagcagggacaacagcaagaacaccctgtacctgcagatgaactctctgagggccgaggacaccgccgtgtactactgcgccaaggaccccaggaagctggactattggggccagggcactctggtgaccgtgagcagc

SEQ ID NO: 230 - DNA, 1011 bp, Artificial Sequence
  Humanised
gacatcgtgatgacccagagccccctgagcctgcccgtgacccctggcgagcccgccagcatcagctgcagaagcagccagagcatcgtccagagcaacggcgacacctacctggaatggtatctgcagaagcccggccagtccccccagctgctgatctacagagtgagcaaccggttcagcggcgtgcccgacagattcagcggcagcggctccggcaccgacttcaccctgaagatcagccgggtggaggccgaggacgtgggcgtgtactactgctttcaaggcagccacgtgccctacaccttcggccagggcaccaagctggaaatcaagcgtacggtggccgcccccagcgtgttcatcttcccccccagcgatgagcagctgaagagcggcaccgccagcgtggtgtgtctgctgaacaacttctacccccgggaggccaaggtgcagtggaaggtggacaatgccctgcagagcggcaacagccaggagagcgtgaccgagcaggacagcaaggactccacctacagcctgagcagcaccctgaccctgagcaaggccgactacgagaagcacaaggtgtacgcctgtgaggtgacccaccagggcctgtccagccccgtgaccaagagcttcaaccggggcgagtgtggatccgaggtgcagctcctggtcagcggcggcggcctggtccagcccggaggctcactgaggctgagctgcgccgctagcggcttcaccttcaaggcctaccccatgatgtgggtcaggcaggcccccggcaaaggcctggagtgggtgtctgagatcagccccagcggcagctacacctactacgccgacagcgtgaagggcaggttcaccatcagcagggacaacagcaagaacaccctgtacctgcagatgaactctctgagggccgaggacaccgccgtgtactactgcgccaaggaccccaggaagctggactattggggccagggcactctggtgaccgtgagcagc

SEQ ID NO: 231 - DNA, 657 bp, Artificial Sequence
  Humanised
gacatcgtgatgacccagagccccctgagcctgcccgtgacccctggcgagcccgccagcatcagctgcagaagcagccagagcatcgtccagagcaacggcgacacctacctggaatggtatctgcagaagcccggccagtccccccagctgctgatctacagagtgagcaaccggttcagcggcgtgcccgacagattcagcggcagcggctccggcaccgacttcaccctgaagatcagccgggtggaggccgaggacgtgggcgtgtactactgctttcaaggcagccacgtgccctacaccttcggccagggcaccaagctggaaatcaagcgtacggtggccgcccccagcgtgttcatcttcccccccagcgatgagcagctgaagagcggcaccgccagcgtggtgtgtctgctgaacaacttctacccccgggaggccaaggtgcagtggaaggtggacaatgccctgcagagcggcaacagccaggagagcgtgaccgagcaggacagcaaggactccacctacagcctgagcagcaccctgaccctgagcaaggccgactacgagaagcacaaggtgtacgcctgtgaggtgacccaccagggcctgtccagccccgtgaccaagagcttcaaccggggcgagtgc

SEQ ID NO: 232 - DNA, 1821 bp, Artificial Sequence
  Humanised
caggtgcagctggtgcagagcggagccgaggtgaagaagcctggcgccagcgtcaaggtgtcctgcaaggccagcggctacaccttcaccgactactacatgaactgggtgcggcaggccccaggccagggactggaatggatgggcaacatcaaccccaacaacggcggcaccaactacaaccagaagttcaaggaccgggtcaccatgaccaccgacaccagcaccagcaccgcctacatggaactgcggagcctgagaagcgacgacaccgccgtgtactactgcgcccggtggatcctgtactacggccggtccaagtggtacttcgacgtgtggggcaggggcacactagtgaccgtgtccagcgccagcaccaagggccccagcgtgttccccctggcccccagcagcaagagcaccagcggcggcacagccgccctgggctgcctggtgaaggactacttccccgaaccggtgaccgtgtcctggaacagcggagccctgaccagcggcgtgcacaccttccccgccgtgctgcagagcagcggcctgtacagcctgagcagcgtggtgaccgtgcccagcagcagcctgggcacccagacctacatctgtaacgtgaaccacaagcccagcaacaccaaggtggacaagaaggtggagcccaagagctgtgacaagacccacacctgccccccctgccctgcccccgagctgctgggaggccccagcgtgttcctgttcccccccaagcctaaggacaccctgatgatcagcagaacccccgaggtgacctgtgtggtggtggatgtgagccacgaggaccctgaggtgaagttcaactggtacgtggacggcgtggaggtgcacaatgccaagaccaagcccagggaggagcagtacaacagcacctaccgggtggtgtccgtgctgaccgtgctgcaccaggattggctgaacggcaaggagtacaagtgtaaggtgtccaacaaggccctgcctgcccctatcgagaaaaccatcagcaaggccaagggccagcccagagagccccaggtgtacaccctgccccctagcagagatgagctgaccaagaaccaggtgtccctgacctgcctggtgaagggcttctaccccagcgacatcgccgtggagtgggagagcaacggccagcccgagaacaactacaagaccaccccccctgtgctggacagcgatggcagcttcttcctgtacagcaagctgaccgtggacaagagcagatggcagcagggcaacgtgttcagctgctccgtgatgcacgaggccctgcacaatcactacacccagaagagcctgagcctgtcccctggcaagggatccgacggcggcggcattaggaggagcatgagcggcacctggtacctgaaggccatgaccgtggatagggagttccccgagatgaacctggagagcgtgacccccatgacactgaccctgctcaagggccacaacctggaggccaaggtcaccatgctgatctcaggcaggtgccaggaggtgaaggcagtgctgggcaggaccaaggagaggaagaagtacaccgccgacgggggcaagcacgtggcctatatcatccccagcgccgtgagggaccacgtgatcttctacagcgagggccagctccacggaaagcccgtgagaggcgtgaagctggtgggcagggaccccaagaacaacctggaggccctggaggacttcgaaaaagccgcaggcgccaggggcctgtccactgagagcatcctgatccctaggcagagcgagacctgcagccccggc

SEQ ID NO: 233 - DNA, 1623 bp, Artificial Sequence
  Humanised
caggtgcagctggtgcagagcggagccgaggtgaagaagcctggcgccagcgtcaaggtgtcctgcaaggccagcggctacaccttcaccgactactacatgaactgggtgcggcaggccccaggccagggactggaatggatgggcaacatcaaccccaacaacggcggcaccaactacaaccagaagttcaaggaccgggtcaccatgaccaccgacaccagcaccagcaccgcctacatggaactgcggagcctgagaagcgacgacaccgccgtgtactactgcgcccggtggatcctgtactacggccggtccaagtggtacttcgacgtgtggggcaggggcacactagtgaccgtgtccagcgccagcaccaagggccccagcgtgttccccctggcccccagcagcaagagcaccagcggcggcacagccgccctgggctgcctggtgaaggactacttccccgaaccggtgaccgtgtcctggaacagcggagccctgaccagcggcgtgcacaccttccccgccgtgctgcagagcagcggcctgtacagcctgagcagcgtggtgaccgtgcccagcagcagcctgggcacccagacctacatctgtaacgtgaaccacaagcccagcaacaccaaggtggacaagaaggtggagcccaagagctgtgacaagacccacacctgccccccctgccctgcccccgagctgctgggaggccccagcgtgttcctgttcccccccaagcctaaggacaccctgatgatcagcagaacccccgaggtgacctgtgtggtggtggatgtgagccacgaggaccctgaggtgaagttcaactggtacgtggacggcgtggaggtgcacaatgccaagaccaagcccagggaggagcagtacaacagcacctaccgggtggtgtccgtgctgaccgtgctgcaccaggattggctgaacggcaaggagtacaagtgtaaggtgtccaacaaggccctgcctgcccctatcgagaaaaccatcagcaaggccaagggccagcccagagagccccaggtgtacaccctgccccctagcagagatgagctgaccaagaaccaggtgtccctgacctgcctggtgaagggcttctaccccagcgacatcgccgtggagtgggagagcaacggccagcccgagaacaactacaagaccaccccccctgtgctggacagcgatggcagcttcttcctgtacagcaagctgaccgtggacaagagcagatggcagcagggcaacgtgttcagctgctccgtgatgcacgaggccctgcacaatcactacacccagaagagcctgagcctgtcccctggcaagggatccgaggtggtggccgccacccccaccagcctgctgatttcctggaggcacccccacttccccacacgctactacaggatcacctacggcgagaccggcggcaacagccccgtgcaggagttcaccgtgcccctgcagcctcccactgccaccatcagcggcctcaagcccggcgtggactacaccatcaccgtgtacgccgtcaccgacggaaggaacggcaggctgctgagcatccccatcagcatcaactacaggacc

SEQ ID NO: 234 - DNA, 1839 bp, Artificial Sequence
  Humanised
caggtgcagctggtgcagagcggagccgaggtgaagaagcctggcgccagcgtcaaggtgtcctgcaaggccagcggctacaccttcaccgactactacatgaactgggtgcggcaggccccaggccagggactggaatggatgggcaacatcaaccccaacaacggcggcaccaactacaaccagaagttcaaggaccgggtcaccatgaccaccgacaccagcaccagcaccgcctacatggaactgcggagcctgagaagcgacgacaccgccgtgtactactgcgcccggtggatcctgtactacggccggtccaagtggtacttcgacgtgtggggcaggggcacactagtgaccgtgtccagcgccagcaccaagggccccagcgtgttccccctggcccccagcagcaagagcaccagcggcggcacagccgccctgggctgcctggtgaaggactacttccccgaaccggtgaccgtgtcctggaacagcggagccctgaccagcggcgtgcacaccttccccgccgtgctgcagagcagcggcctgtacagcctgagcagcgtggtgaccgtgcccagcagcagcctgggcacccagacctacatctgtaacgtgaaccacaagcccagcaacaccaaggtggacaagaaggtggagcccaagagctgtgacaagacccacacctgccccccctgccctgcccccgagctgctgggaggccccagcgtgttcctgttcccccccaagcctaaggacaccctgatgatcagcagaacccccgaggtgacctgtgtggtggtggatgtgagccacgaggaccctgaggtgaagttcaactggtacgtggacggcgtggaggtgcacaatgccaagaccaagcccagggaggagcagtacaacagcacctaccgggtggtgtccgtgctgaccgtgctgcaccaggattggctgaacggcaaggagtacaagtgtaaggtgtccaacaaggccctgcctgcccctatcgagaaaaccatcagcaaggccaagggccagcccagagagccccaggtgtacaccctgccccctagcagagatgagctgaccaagaaccaggtgtccctgacctgcctggtgaagggcttctaccccagcgacatcgccgtggagtgggagagcaacggccagcccgagaacaactacaagaccaccccccctgtgctggacagcgatggcagcttcttcctgtacagcaagctgaccgtggacaagagcagatggcagcagggcaacgtgttcagctgctccgtgatgcacgaggccctgcacaatcactacacccagaagagcctgagcctgtcccctggcaagaccgtggccgccccctcgggatccgacggcggcggcattaggaggagcatgagcggcacctggtacctgaaggccatgaccgtggatagggagttccccgagatgaacctggagagcgtgacccccatgacactgaccctgctcaagggccacaacctggaggccaaggtcaccatgctgatctcaggcaggtgccaggaggtgaaggcagtgctgggcaggaccaaggagaggaagaagtacaccgccgacgggggcaagcacgtggcctatatcatccccagcgccgtgagggaccacgtgatcttctacagcgagggccagctccacggaaagcccgtgagaggcgtgaagctggtgggcagggaccccaagaacaacctggaggccctggaggacttcgaaaaagccgcaggcgccaggggcctgtccactgagagcatcctgatccctaggcagagcgagacctgcagccccggc

SEQ ID NO: 235 - DNA, 1539 bp, Artificial Sequence
  Humanised
caggtgcagctggtgcagagcggagccgaggtgaagaagcctggcgccagcgtcaaggtgtcctgcaaggccagcggctacaccttcaccgactactacatgaactgggtgcggcaggccccaggccagggactggaatggatgggcaacatcaaccccaacaacggcggcaccaactacaaccagaagttcaaggaccgggtcaccatgaccaccgacaccagcaccagcaccgcctacatggaactgcggagcctgagaagcgacgacaccgccgtgtactactgcgcccggtggatcctgtactacggccggtccaagtggtacttcgacgtgtggggcaggggcacactagtgaccgtgtccagcgccagcaccaagggccccagcgtgttccccctggcccccagcagcaagagcaccagcggcggcacagccgccctgggctgcctggtgaaggactacttccccgaaccggtgaccgtgtcctggaacagcggagccctgaccagcggcgtgcacaccttccccgccgtgctgcagagcagcggcctgtacagcctgagcagcgtggtgaccgtgcccagcagcagcctgggcacccagacctacatctgtaacgtgaaccacaagcccagcaacaccaaggtggacaagaaggtggagcccaagagctgtgacaagacccacacctgccccccctgccctgcccccgagctgctgggaggccccagcgtgttcctgttcccccccaagcctaaggacaccctgatgatcagcagaacccccgaggtgacctgtgtggtggtggatgtgagccacgaggaccctgaggtgaagttcaactggtacgtggacggcgtggaggtgcacaatgccaagaccaagcccagggaggagcagtacaacagcacctaccgggtggtgtccgtgctgaccgtgctgcaccaggattggctgaacggcaaggagtacaagtgtaaggtgtccaacaaggccctgcctgcccctatcgagaaaaccatcagcaaggccaagggccagcccagagagccccaggtgtacaccctgccccctagcagagatgagctgaccaagaaccaggtgtccctgacctgcctggtgaagggcttctaccccagcgacatcgccgtggagtgggagagcaacggccagcccgagaacaactacaagaccaccccccctgtgctggacagcgatggcagcttcttcctgtacagcaagctgaccgtggacaagagcagatggcagcagggcaacgtgttcagctgctccgtgatgcacgaggccctgcacaatcactacacccagaagagcctgagcctgtcccctggcaagggatccgtggacaacaagttcaacaaggagctgaggcaggcctactgggagatccaggccctgcccaatctgaactggacccagagcagggccttcatcaggagcctgtacgacgaccccagccagagcgctaacctcctggccgaggccaaaaagctgaacgacgcccaggcccccaag

SEQ ID NO: 236 - DNA, 1557 bp, Artificial Sequence
  Humanised
caggtgcagctggtgcagagcggagccgaggtgaagaagcctggcgccagcgtcaaggtgtcctgcaaggccagcggctacaccttcaccgactactacatgaactgggtgcggcaggccccaggccagggactggaatggatgggcaacatcaaccccaacaacggcggcaccaactacaaccagaagttcaaggaccgggtcaccatgaccaccgacaccagcaccagcaccgcctacatggaactgcggagcctgagaagcgacgacaccgccgtgtactactgcgcccggtggatcctgtactacggccggtccaagtggtacttcgacgtgtggggcaggggcacactagtgaccgtgtccagcgccagcaccaagggccccagcgtgttccccctggcccccagcagcaagagcaccagcggcggcacagccgccctgggctgcctggtgaaggactacttccccgaaccggtgaccgtgtcctggaacagcggagccctgaccagcggcgtgcacaccttccccgccgtgctgcagagcagcggcctgtacagcctgagcagcgtggtgaccgtgcccagcagcagcctgggcacccagacctacatctgtaacgtgaaccacaagcccagcaacaccaaggtggacaagaaggtggagcccaagagctgtgacaagacccacacctgccccccctgccctgcccccgagctgctgggaggccccagcgtgttcctgttcccccccaagcctaaggacaccctgatgatcagcagaacccccgaggtgacctgtgtggtggtggatgtgagccacgaggaccctgaggtgaagttcaactggtacgtggacggcgtggaggtgcacaatgccaagaccaagcccagggaggagcagtacaacagcacctaccgggtggtgtccgtgctgaccgtgctgcaccaggattggctgaacggcaaggagtacaagtgtaaggtgtccaacaaggccctgcctgcccctatcgagaaaaccatcagcaaggccaagggccagcccagagagccccaggtgtacaccctgccccctagcagagatgagctgaccaagaaccaggtgtccctgacctgcctggtgaagggcttctaccccagcgacatcgccgtggagtgggagagcaacggccagcccgagaacaactacaagaccaccccccctgtgctggacagcgatggcagcttcttcctgtacagcaagctgaccgtggacaagagcagatggcagcagggcaacgtgttcagctgctccgtgatgcacgaggccctgcacaatcactacacccagaagagcctgagcctgtcccctggcaagaccgtggccgccccctcgggatccgtggacaacaagttcaacaaggagctgaggcaggcctactgggagatccaggccctgcccaatctgaactggacccagagcagggccttcatcaggagcctgtacgacgaccccagccagagcgctaacctcctggccgaggccaaaaagctgaacgacgcccaggcccccaag

SEQ ID NO: 237 - DNA, 1734 bp, Artificial Sequence
  Humanised
caggtgcagctggtgcagagcggagccgaggtgaagaagcctggcgccagcgtcaaggtgtcctgcaaggccagcggctacaccttcaccgactactacatgaactgggtgcggcaggccccaggccagggactggaatggatgggcaacatcaaccccaacaacggcggcaccaactacaaccagaagttcaaggaccgggtcaccatgaccaccgacaccagcaccagcaccgcctacatggaactgcggagcctgagaagcgacgacaccgccgtgtactactgcgcccggtggatcctgtactacggccggtccaagtggtacttcgacgtgtggggcaggggcacactagtgaccgtgtccagcgccagcaccaagggccccagcgtgttccccctggcccccagcagcaagagcaccagcggcggcacagccgccctgggctgcctggtgaaggactacttccccgaaccggtgaccgtgtcctggaacagcggagccctgaccagcggcgtgcacaccttccccgccgtgctgcagagcagcggcctgtacagcctgagcagcgtggtgaccgtgcccagcagcagcctgggcacccagacctacatctgtaacgtgaaccacaagcccagcaacaccaaggtggacaagaaggtggagcccaagagctgtgacaagacccacacctgccccccctgccctgcccccgagctgctgggaggccccagcgtgttcctgttcccccccaagcctaaggacaccctgatgatcagcagaacccccgaggtgacctgtgtggtggtggatgtgagccacgaggaccctgaggtgaagttcaactggtacgtggacggcgtggaggtgcacaatgccaagaccaagcccagggaggagcagtacaacagcacctaccgggtggtgtccgtgctgaccgtgctgcaccaggattggctgaacggcaaggagtacaagtgtaaggtgtccaacaaggccctgcctgcccctatcgagaaaaccatcagcaaggccaagggccagcccagagagccccaggtgtacaccctgccccctagcagagatgagctgaccaagaaccaggtgtccctgacctgcctggtgaagggcttctaccccagcgacatcgccgtggagtgggagagcaacggccagcccgagaacaactacaagaccaccccccctgtgctggacagcgatggcagcttcttcctgtacagcaagctgaccgtggacaagagcagatggcagcagggcaacgtgttcagctgctccgtgatgcacgaggccctgcacaatcactacacccagaagagcctgagcctgtcccctggcaagggatccgacctggggaaaaagctgcttgaagccgctagggcaggacaggatgacgaggtgaggattctgatggcaaatggcgccgacgtcaatgccaaagacgagtacggcctcacccctctttatctggccactgcacacggacacttggagatcgtggaggtgctgctcaagaacggagctgatgtgaacgctgtggacgctattgggttcacaccccttcacctcgcagcctttattggccacctggagatcgccgaagttctcctgaaacacggcgcagacgtcaacgcacaggataagttcgggaagaccgccttcgacatcagcatcggcaatgggaacgaggatctggccgagatcctgcagaagctg

SEQ ID NO: 238 - DNA, 1752 bp, Artificial Sequence
  Humanised
caggtgcagctggtgcagagcggagccgaggtgaagaagcctggcgccagcgtcaaggtgtcctgcaaggccagcggctacaccttcaccgactactacatgaactgggtgcggcaggccccaggccagggactggaatggatgggcaacatcaaccccaacaacggcggcaccaactacaaccagaagttcaaggaccgggtcaccatgaccaccgacaccagcaccagcaccgcctacatggaactgcggagcctgagaagcgacgacaccgccgtgtactactgcgcccggtggatcctgtactacggccggtccaagtggtacttcgacgtgtggggcaggggcacactagtgaccgtgtccagcgccagcaccaagggccccagcgtgttccccctggcccccagcagcaagagcaccagcggcggcacagccgccctgggctgcctggtgaaggactacttccccgaaccggtgaccgtgtcctggaacagcggagccctgaccagcggcgtgcacaccttccccgccgtgctgcagagcagcggcctgtacagcctgagcagcgtggtgaccgtgcccagcagcagcctgggcacccagacctacatctgtaacgtgaaccacaagcccagcaacaccaaggtggacaagaaggtggagcccaagagctgtgacaagacccacacctgccccccctgccctgcccccgagctgctgggaggccccagcgtgttcctgttcccccccaagcctaaggacaccctgatgatcagcagaacccccgaggtgacctgtgtggtggtggatgtgagccacgaggaccctgaggtgaagttcaactggtacgtggacggcgtggaggtgcacaatgccaagaccaagcccagggaggagcagtacaacagcacctaccgggtggtgtccgtgctgaccgtgctgcaccaggattggctgaacggcaaggagtacaagtgtaaggtgtccaacaaggccctgcctgcccctatcgagaaaaccatcagcaaggccaagggccagcccagagagccccaggtgtacaccctgccccctagcagagatgagctgaccaagaaccaggtgtccctgacctgcctggtgaagggcttctaccccagcgacatcgccgtggagtgggagagcaacggccagcccgagaacaactacaagaccaccccccctgtgctggacagcgatggcagcttcttcctgtacagcaagctgaccgtggacaagagcagatggcagcagggcaacgtgttcagctgctccgtgatgcacgaggccctgcacaatcactacacccagaagagcctgagcctgtcccctggcaagaccgtggccgccccctcgggatccgacctggggaaaaagctgcttgaagccgctagggcaggacaggatgacgaggtgaggattctgatggcaaatggcgccgacgtcaatgccaaagacgagtacggcctcacccctctttatctggccactgcacacggacacttggagatcgtggaggtgctgctcaagaacggagctgatgtgaacgctgtggacgctattgggttcacaccccttcacctcgcagcctttattggccacctggagatcgccgaagttctcctgaaacacggcgcagacgtcaacgcacaggataagttcgggaagaccgccttcgacatcagcatcggcaatgggaacgaggatctggccgagatcctgcagaagctg

SEQ ID NO: 239 - DNA, 1722 bp, Artificial Sequence
  Humanised
caggtgaccctgagggagagcggccccgccctggtgaagcccacccagaccctgaccctgacctgcaccttcagcggctttagcctcagcacctccggcatgggcgtgagctggatcaggcagccacccggcaaaggcctggagtggctggcccacatctactgggacgacgacaagaggtacaaccccagcctgaagagccggctgaccatcagcaaggataccagcaggaaccaggtggtgctgaccatgaccaacatggaccccgtggacaccgctacctactactgcgccaggagggagaccgtcttctactggtacttcgacgtgtggggaaggggcacactagtgaccgtgtccagcgccagcaccaagggccccagcgtgttccccctggcccccagcagcaagagcaccagcggcggcacagccgccctgggctgcctggtgaaggactacttccccgaaccggtgaccgtgtcctggaacagcggagccctgaccagcggcgtgcacaccttccccgccgtgctgcagagcagcggcctgtacagcctgagcagcgtggtgaccgtgcccagcagcagcctgggcacccagacctacatctgtaacgtgaaccacaagcccagcaacaccaaggtggacaagaaggtggagcccaagagctgtgacaagacccacacctgccccccctgccctgcccccgagctgctgggaggccccagcgtgttcctgttcccccccaagcctaaggacaccctgatgatcagcagaacccccgaggtgacctgtgtggtggtggatgtgagccacgaggaccctgaggtgaagttcaactggtacgtggacggcgtggaggtgcacaatgccaagaccaagcccagggaggagcagtacaacagcacctaccgggtggtgtccgtgctgaccgtgctgcaccaggattggctgaacggcaaggagtacaagtgtaaggtgtccaacaaggccctgcctgcccctatcgagaaaaccatcagcaaggccaagggccagcccagagagccccaggtgtacaccctgccccctagcagagatgagctgaccaagaaccaggtgtccctgacctgcctggtgaagggcttctaccccagcgacatcgccgtggagtgggagagcaacggccagcccgagaacaactacaagaccaccccccctgtgctggacagcgatggcagcttcttcctgtacagcaagctgaccgtggacaagagcagatggcagcagggcaacgtgttcagctgctccgtgatgcacgaggccctgcacaatcactacacccagaagagcctgagcctgtcccctggcaagggatcccaggtgcagctggtggagtctgggggaggcttggtgcaggctggggggtctctgagactctcctgtgcagcctctggatacgcatacacttacatctacatgggctggttccgccaggctccagggaaagagcgtgagggggtcgcagctatggatagtggtggtggtggcacactctacgccgactccgtgaagggccgattcaccatctcccgcgacaaaggcaagaacacggtgtatctgcaaatggacagcctgaaacctgaggacacggccacgtattactgtgctgcaggtggctacgagctgcgtgaccggacatatgggcagtggggccaggggacccaggtcaccgtctcctca

SEQ ID NO: 240 - DNA, 1698 bp, Artificial Sequence
  Humanised
caggtgaccctgagggagagcggccccgccctggtgaagcccacccagaccctgaccctgacctgcaccttcagcggctttagcctcagcacctccggcatgggcgtgagctggatcaggcagccacccggcaaaggcctggagtggctggcccacatctactgggacgacgacaagaggtacaaccccagcctgaagagccggctgaccatcagcaaggataccagcaggaaccaggtggtgctgaccatgaccaacatggaccccgtggacaccgctacctactactgcgccaggagggagaccgtcttctactggtacttcgacgtgtggggaaggggcacactagtgaccgtgtccagcgccagcaccaagggccccagcgtgttccccctggcccccagcagcaagagcaccagcggcggcacagccgccctgggctgcctggtgaaggactacttccccgaaccggtgaccgtgtcctggaacagcggagccctgaccagcggcgtgcacaccttccccgccgtgctgcagagcagcggcctgtacagcctgagcagcgtggtgaccgtgcccagcagcagcctgggcacccagacctacatctgtaacgtgaaccacaagcccagcaacaccaaggtggacaagaaggtggagcccaagagctgtgacaagacccacacctgccccccctgccctgcccccgagctgctgggaggccccagcgtgttcctgttcccccccaagcctaaggacaccctgatgatcagcagaacccccgaggtgacctgtgtggtggtggatgtgagccacgaggaccctgaggtgaagttcaactggtacgtggacggcgtggaggtgcacaatgccaagaccaagcccagggaggagcagtacaacagcacctaccgggtggtgtccgtgctgaccgtgctgcaccaggattggctgaacggcaaggagtacaagtgtaaggtgtccaacaaggccctgcctgcccctatcgagaaaaccatcagcaaggccaagggccagcccagagagccccaggtgtacaccctgccccctagcagagatgagctgaccaagaaccaggtgtccctgacctgcctggtgaagggcttctaccccagcgacatcgccgtggagtgggagagcaacggccagcccgagaacaactacaagaccaccccccctgtgctggacagcgatggcagcttcttcctgtacagcaagctgaccgtggacaagagcagatggcagcagggcaacgtgttcagctgctccgtgatgcacgaggccctgcacaatcactacacccagaagagcctgagcctgtcccctggcaagggatccgcgcgcgtcgaccagacgccgcgcagcgtcacgaaggaaaccggcgagtccctcaccatcaactgcgtgctgcgggatgcctcctacgccctgggcagcacatgttggtacagaaagaagagcggggaaggcaacgaggagtccatctccaaggggggaagatacgtcgagaccgtgaacagcggaagcaagagcttcagcctgcggatcaacgacctcaccgtcgaggacgggggcacctaccgttgcggtctgggcgtggccggcggctattgcgattacgccctgtgcagtagccggtatgctgagtgcggcgacggcaccgctgtgaccgtgaac

SEQ ID NO: 241 - DNA, 1641 bp, Artificial Sequence
  Humanised
caggtgcagctggtgcagagcggagccgaggtgaagaagcctggcgccagcgtcaaggtgtcctgcaaggccagcggctacaccttcaccgactactacatgaactgggtgcggcaggccccaggccagggactggaatggatgggcaacatcaaccccaacaacggcggcaccaactacaaccagaagttcaaggaccgggtcaccatgaccaccgacaccagcaccagcaccgcctacatggaactgcggagcctgagaagcgacgacaccgccgtgtactactgcgcccggtggatcctgtactacggccggtccaagtggtacttcgacgtgtggggcaggggcacactagtgaccgtgtccagcgccagcaccaagggccccagcgtgttccccctggcccccagcagcaagagcaccagcggcggcacagccgccctgggctgcctggtgaaggactacttccccgaaccggtgaccgtgtcctggaacagcggagccctgaccagcggcgtgcacaccttccccgccgtgctgcagagcagcggcctgtacagcctgagcagcgtggtgaccgtgcccagcagcagcctgggcacccagacctacatctgtaacgtgaaccacaagcccagcaacaccaaggtggacaagaaggtggagcccaagagctgtgacaagacccacacctgccccccctgccctgcccccgagctgctgggaggccccagcgtgttcctgttcccccccaagcctaaggacaccctgatgatcagcagaacccccgaggtgacctgtgtggtggtggatgtgagccacgaggaccctgaggtgaagttcaactggtacgtggacggcgtggaggtgcacaatgccaagaccaagcccagggaggagcagtacaacagcacctaccgggtggtgtccgtgctgaccgtgctgcaccaggattggctgaacggcaaggagtacaagtgtaaggtgtccaacaaggccctgcctgcccctatcgagaaaaccatcagcaaggccaagggccagcccagagagccccaggtgtacaccctgccccctagcagagatgagctgaccaagaaccaggtgtccctgacctgcctggtgaagggcttctaccccagcgacatcgccgtggagtgggagagcaacggccagcccgagaacaactacaagaccaccccccctgtgctggacagcgatggcagcttcttcctgtacagcaagctgaccgtggacaagagcagatggcagcagggcaacgtgttcagctgctccgtgatgcacgaggccctgcacaatcactacacccagaagagcctgagcctgtcccctggcaagaccgtggccgccccctcgggatccgaggtggtggccgccacccccaccagcctgctgatttcctggaggcacccccacttccccacacgctactacaggatcacctacggcgagaccggcggcaacagccccgtgcaggagttcaccgtgcccctgcagcctcccactgccaccatcagcggcctcaagcccggcgtggactacaccatcaccgtgtacgccgtcaccgacggaaggaacggcaggctgctgagcatccccatcagcatcaactacaggacc

SEQ ID NO: 242 - DNA, 1611 bp, Artificial Sequence
  Humanised
caggtgcagctgaagcagagcggccctggcctggtgcagccctctcagagcctgagcatcacctgtaccgtgagcggcttcagcctgaccaattacggcgtgcattgggtgcggcagtctccaggcaagggcctggaatggctgggagtgatctggtccggcggcaacaccgactacaacacccccttcaccagcagactgagcatcaacaaggacaacagcaagagccaggtgttcttcaagatgaacagcctgcagagcaacgacaccgccatctactattgtgccagggccctgacctactacgactacgagttcgcctactggggccagggcaccctggtgaccgtgagcgccgctagcaccaagggccccagcgtgttccccctggcccccagcagcaagagcaccagcggcggcacagccgccctgggctgcctggtgaaggactacttccccgagcctgtgaccgtgtcctggaatagcggagccctgacctccggcgtgcacaccttccccgccgtgctgcagagcagcggcctgtactccctgagcagcgtggtgaccgtgcccagcagcagcctgggcacccagacctacatctgcaacgtgaaccacaagcccagcaacaccaaagtggacaagaaagtggagcccaagagctgcgataagacccacacctgccccccctgccctgcccccgagctgctgggcggacctagcgtgttcctgttcccccccaagcctaaggacaccctgatgatcagcaggacccccgaagtgacctgcgtggtggtggatgtgagccacgaggaccctgaagtgaagttcaactggtacgtggacggcgtggaagtgcacaacgccaagaccaagcccagagaggagcagtacaacagcacctaccgcgtggtgtctgtgctgaccgtgctgcaccaggattggctgaacggcaaggagtacaagtgcaaagtgagcaacaaggccctgcctgcccctatcgagaaaaccatcagcaaggccaagggccagcctagagagccccaggtctacaccctgcctccctccagagatgagctgaccaagaaccaggtgtccctgacctgtctggtgaagggcttctaccccagcgacatcgccgtggagtgggagagcaacggccagcccgagaacaactacaagaccaccccccctgtgctggacagcgatggcagcttcttcctgtactccaagctgaccgtggacaagagcagatggcagcagggcaacgtgttcagctgcagcgtgatgcacgaggccctgcacaatcactacacccagaagagtctgagcctgtctcctggcaagagatccgaggtggtggccgccacccccaccagcctgctgatttcctggaggcacccccacttccccacacgctactacaggatcacctacggcgagaccggcggcaacagccccgtgcaggagttcaccgtgcccctgcagcctcccactgccaccatcagcggcctcaagcccggcgtggactacaccatcaccgtgtacgccgtcaccgacggaaggaacggcaggctgctgagcatccccatcagcatcaactacaggacc

SEQ ID NO: 243 - protein, 642 aa, Artificial Sequence
  Humanised
GACATCCTGCTGACCCAGAGCCCCGTGATCCTGAGCGTGAGCCCTGGCGAGAGAGTGAGCTTCAGCTGCCGGGCCAGCCAGAGCATCGGCACCAACATCCACTGGTATCAGCAGCGGACCAACGGCAGCCCCAGGCTGCTGATCAAGTACGCCAGCGAGTCCATCAGCGGCATCCCCAGCCGGTTCAGCGGCAGCGGCTCCGGCACCGACTTCACCCTGAGCATCAACAGCGTGGAGAGCGAGGATATCGCCGACTACTACTGCCAGCAGAACAACAACTGGCCCACCACCTTCGGAGCCGGCACCAAGCTGGAACTGAAGCGTACGGTGGCCGCCCCCAGCGTGTTCATCTTCCCCCCCAGCGATGAGCAGCTCAAGAGCGGCACCGCCAGCGTGGTGTGTCTGCTGAACAACTTCTACCCCCGGGAGGCCAAAGTGCAGTGGAAAGTGGACAACGCCCTGCAGAGCGGCAACAGCCAGGAGAGCGTGACCGAGCAGGACAGCAAGGACTCCACCTACAGCCTGAGCAGCACCCTGACCCTGAGCAAGGCCGACTACGAGAAGCACAAAGTGTACGCCTGCGAAGTGACCCACCAGGGCCTGTCCAGCCCCGTGACCAAGAGCTTCAACCGGGGCGAGTGC

SEQ ID NO: 244 - DNA, 906 bp, Artificial Sequence
  Humanised
gacatcctgctgacccagagccccgtgatcctgagcgtgagccctggcgagagagtgagcttcagctgccgggccagccagagcatcggcaccaacatccactggtatcagcagcggaccaacggcagccccaggctgctgatcaagtacgccagcgagtccatcagcggcatccccagccggttcagcggcagcggctccggcaccgacttcaccctgagcatcaacagcgtggagagcgaggatatcgccgactactactgccagcagaacaacaactggcccaccaccttcggagccggcaccaagctggaactgaagcgtacggtggccgcccccagcgtgttcatcttcccccccagcgatgagcagctcaagagcggcaccgccagcgtggtgtgtctgctgaacaacttctacccccgggaggccaaagtgcagtggaaagtggacaacgccctgcagagcggcaacagccaggagagcgtgaccgagcaggacagcaaggactccacctacagcctgagcagcaccctgaccctgagcaaggccgactacgagaagcacaaagtgtacgcctgcgaagtgacccaccagggcctgtccagccccgtgaccaagagcttcaaccgaggcgagtgcagatccgaggtggtggccgccacccccaccagcctgctgatttcctggaggcacccccacttccccacacgctactacaggatcacctacggcgagaccggcggcaacagccccgtgcaggagttcaccgtgcccctgcagcctcccactgccaccatcagcggcctcaagcccggcgtggactacaccatcaccgtgtacgccgtcaccgacggaaggaacggcaggctgctgagcatccccatcagcatcaactacaggacc

SEQ ID NO: 245 - DNA, 1347 bp, Artificial Sequence
  Humanised
caggtgcagctgaagcagagcggccctggcctggtgcagccctctcagagcctgagcatcacctgtaccgtgagcggcttcagcctgaccaattacggcgtgcattgggtgcggcagtctccaggcaagggcctggaatggctgggagtgatctggtccggcggcaacaccgactacaacacccccttcaccagcagactgagcatcaacaaggacaacagcaagagccaggtgttcttcaagatgaacagcctgcagagcaacgacaccgccatctactattgtgccagggccctgacctactacgactacgagttcgcctactggggccagggcaccctggtgaccgtgagcgccgctagcaccaagggccccagcgtgttccccctggcccccagcagcaagagcaccagcggcggcacagccgccctgggctgcctggtgaaggactacttccccgagcctgtgaccgtgtcctggaatagcggagccctgacctccggcgtgcacaccttccccgccgtgctgcagagcagcggcctgtactccctgagcagcgtggtgaccgtgcccagcagcagcctgggcacccagacctacatctgcaacgtgaaccacaagcccagcaacaccaaagtggacaagaaagtggagcccaagagctgcgataagacccacacctgccccccctgccctgcccccgagctgctgggcggacctagcgtgttcctgttcccccccaagcctaaggacaccctgatgatcagcaggacccccgaagtgacctgcgtggtggtggatgtgagccacgaggaccctgaagtgaagttcaactggtacgtggacggcgtggaagtgcacaacgccaagaccaagcccagagaggagcagtacaacagcacctaccgcgtggtgtctgtgctgaccgtgctgcaccaggattggctgaacggcaaggagtacaagtgcaaagtgagcaacaaggccctgcctgcccctatcgagaaaaccatcagcaaggccaagggccagcctagagagccccaggtctacaccctgcctccctccagagatgagctgaccaagaaccaggtgtccctgacctgtctggtgaagggcttctaccccagcgacatcgccgtggagtgggagagcaacggccagcccgagaacaactacaagaccaccccccctgtgctggacagcgatggcagcttcttcctgtactccaagctgaccgtggacaagagcagatggcagcagggcaacgtgttcagctgcagcgtgatgcacgaggccctgcacaatcactacacccagaagagtctgagcctgtcccctggcaag

SEQ ID NO: 246 - DNA, 1617 bp, Artificial Sequence
  Humanised
gaggtggtggccgccacccccaccagcctgctgatttcctggaggcacccccacttccccacacgctactacaggatcacctacggcgagaccggcggcaacagccccgtgcaggagttcaccgtgcccctgcagcctcccactgccaccatcagcggcctcaagcccggcgtggactacaccatcaccgtgtacgccgtcaccgacggaaggaacggcaggctgctgagcatccccatcagcatcaactacaggaccggatccaccggccaggtgcagctgaagcagagcggccctggcctggtgcagccctctcagagcctgagcatcacctgtaccgtgagcggcttcagcctgaccaattacggcgtgcattgggtgcggcagtctccaggcaagggcctggaatggctgggagtgatctggtccggcggcaacaccgactacaacacccccttcaccagcagactgagcatcaacaaggacaacagcaagagccaggtgttcttcaagatgaacagcctgcagagcaacgacaccgccatctactattgtgccagggccctgacctactacgactacgagttcgcctactggggccagggcaccctggtgaccgtgagcgccgctagcaccaagggccccagcgtgttccccctggcccccagcagcaagagcaccagcggcggcacagccgccctgggctgcctggtgaaggactacttccccgagcctgtgaccgtgtcctggaatagcggagccctgacctccggcgtgcacaccttccccgccgtgctgcagagcagcggcctgtactccctgagcagcgtggtgaccgtgcccagcagcagcctgggcacccagacctacatctgcaacgtgaaccacaagcccagcaacaccaaagtggacaagaaagtggagcccaagagctgcgataagacccacacctgccccccctgccctgcccccgagctgctgggcggacctagcgtgttcctgttcccccccaagcctaaggacaccctgatgatcagcaggacccccgaagtgacctgcgtggtggtggatgtgagccacgaggaccctgaagtgaagttcaactggtacgtggacggcgtggaagtgcacaacgccaagaccaagcccagagaggagcagtacaacagcacctaccgcgtggtgtctgtgctgaccgtgctgcaccaggattggctgaacggcaaggagtacaagtgcaaagtgagcaacaaggccctgcctgcccctatcgagaaaaccatcagcaaggccaagggccagcctagagagccccaggtctacaccctgcctccctccagagatgagctgaccaagaaccaggtgtccctgacctgtctggtgaagggcttctaccccagcgacatcgccgtggagtgggagagcaacggccagcccgagaacaactacaagaccaccccccctgtgctggacagcgatggcagcttcttcctgtactccaagctgaccgtggacaagagcagatggcagcagggcaacgtgttcagctgcagcgtgatgcacgaggccctgcacaatcactacacccagaagagtctgagcctgtcccctggcaag

SEQ ID NO: 247 - DNA, 909 bp, Artificial Sequence
  Humanised
gaggtggtggccgccacccccaccagcctgctgatttcctggaggcacccccacttccccacacgctactacaggatcacctacggcgagaccggcggcaacagccccgtgcaggagttcaccgtgcccctgcagcctcccactgccaccatcagcggcctcaagcccggcgtggactacaccatcaccgtgtacgccgtcaccgacggaaggaacggcaggctgctgagcatccccatcagcatcaactacaggacgtcgaccggtgacatcctgctgacccagagccccgtgatcctgagcgtgagccctggcgagagagtgagcttcagctgccgggccagccagagcatcggcaccaacatccactggtatcagcagcggaccaacggcagccccaggctgctgatcaagtacgccagcgagtccatcagcggcatccccagccggttcagcggcagcggctccggcaccgacttcaccctgagcatcaacagcgtggagagcgaggatatcgccgactactactgccagcagaacaacaactggcccaccaccttcggagccggcaccaagctggaactgaagcgtacggtggccgcccccagcgtgttcatcttcccccccagcgatgagcagctcaagagcggcaccgccagcgtggtgtgtctgctgaacaacttctacccccgggaggccaaagtgcagtggaaagtggacaacgccctgcagagcggcaacagccaggagagcgtgaccgagcaggacagcaaggactccacctacagcctgagcagcaccctgaccctgagcaaggccgactacgagaagcacaaagtgtacgcctgcgaagtgacccaccagggcctgtccagccccgtgaccaagagcttcaaccggggcgagtgc

SEQ ID NO: 248 - DNA, 1707 bp, Artificial Sequence
  Humanised
caggtgaccctgagggagagcggccccgccctggtgaagcccacccagaccctgaccctgacctgcaccttcagcggctttagcctcagcacctccggcatgggcgtgagctggatcaggcagccacccggcaaaggcctggagtggctggcccacatctactgggacgacgacaagaggtacaaccccagcctgaagagccggctgaccatcagcaaggataccagcaggaaccaggtggtgctgaccatgaccaacatggaccccgtggacaccgctacctactactgcgccaggagggagaccgtcttctactggtacttcgacgtgtggggaaggggcacactagtgaccgtgtccagcgccagcaccaagggccccagcgtgttccccctggcccccagcagcaagagcaccagcggcggcacagccgccctgggctgcctggtgaaggactacttccccgaaccggtgaccgtgtcctggaacagcggagccctgaccagcggcgtgcacaccttccccgccgtgctgcagagcagcggcctgtacagcctgagcagcgtggtgaccgtgcccagcagcagcctgggcacccagacctacatctgtaacgtgaaccacaagcccagcaacaccaaggtggacaagaaggtggagcccaagagctgtgacaagacccacacctgccccccctgccctgcccccgagctgctgggaggccccagcgtgttcctgttcccccccaagcctaaggacaccctgatgatcagcagaacccccgaggtgacctgtgtggtggtggatgtgagccacgaggaccctgaggtgaagttcaactggtacgtggacggcgtggaggtgcacaatgccaagaccaagcccagggaggagcagtacaacagcacctaccgggtggtgtccgtgctgaccgtgctgcaccaggattggctgaacggcaaggagtacaagtgtaaggtgtccaacaaggccctgcctgcccctatcgagaaaaccatcagcaaggccaagggccagcccagagagccccaggtgtacaccctgccccctagcagagatgagctgaccaagaaccaggtgtccctgacctgcctggtgaagggcttctaccccagcgacatcgccgtggagtgggagagcaacggccagcccgagaacaactacaagaccaccccccctgtgctggacagcgatggcagcttcttcctgtacagcaagctgaccgtggacaagagcagatggcagcagggcaacgtgttcagctgctccgtgatgcacgaggccctgcacaatcactacacccagaagagcctgagcctgtcccctggcaagggcgtgcagctcctggagagcggcggaggcctggtccagcccggcggcagcctgaggctgagctgcgccgccagcggcttcgtgttcccctggtatgatatgggctgggtgaggcaggcccccggcaagggcctggagtgggtgtccagcatcgactggcacgggaagatcacctactacgccgacagcgtgaagggcaggttcaccatcagcagggacaacagcaagaacaccctgtacctgcagatgaacagcctgagggccgaggacaccgcagtgtactactgcgccaccgccgaggacgaacccggctacgactactggggccagggcaccctggtgactgtgagcagc

SEQ ID NO: 249 - DNA, 1725 bp, Artificial Sequence
  Humanised
caggtgaccctgagggagagcggccccgccctggtgaagcccacccagaccctgaccctgacctgcaccttcagcggctttagcctcagcacctccggcatgggcgtgagctggatcaggcagccacccggcaaaggcctggagtggctggcccacatctactgggacgacgacaagaggtacaaccccagcctgaagagccggctgaccatcagcaaggataccagcaggaaccaggtggtgctgaccatgaccaacatggaccccgtggacaccgctacctactactgcgccaggagggagaccgtcttctactggtacttcgacgtgtggggaaggggcacactagtgaccgtgtccagcgccagcaccaagggccccagcgtgttccccctggcccccagcagcaagagcaccagcggcggcacagccgccctgggctgcctggtgaaggactacttccccgaaccggtgaccgtgtcctggaacagcggagccctgaccagcggcgtgcacaccttccccgccgtgctgcagagcagcggcctgtacagcctgagcagcgtggtgaccgtgcccagcagcagcctgggcacccagacctacatctgtaacgtgaaccacaagcccagcaacaccaaggtggacaagaaggtggagcccaagagctgtgacaagacccacacctgccccccctgccctgcccccgagctgctgggaggccccagcgtgttcctgttcccccccaagcctaaggacaccctgatgatcagcagaacccccgaggtgacctgtgtggtggtggatgtgagccacgaggaccctgaggtgaagttcaactggtacgtggacggcgtggaggtgcacaatgccaagaccaagcccagggaggagcagtacaacagcacctaccgggtggtgtccgtgctgaccgtgctgcaccaggattggctgaacggcaaggagtacaagtgtaaggtgtccaacaaggccctgcctgcccctatcgagaaaaccatcagcaaggccaagggccagcccagagagccccaggtgtacaccctgccccctagcagagatgagctgaccaagaaccaggtgtccctgacctgcctggtgaagggcttctaccccagcgacatcgccgtggagtgggagagcaacggccagcccgagaacaactacaagaccaccccccctgtgctggacagcgatggcagcttcttcctgtacagcaagctgaccgtggacaagagcagatggcagcagggcaacgtgttcagctgctccgtgatgcacgaggccctgcacaatcactacacccagaagagcctgagcctgtcccctggcaagaccgtggccgccccctcgggcgtgcagctcctggagagcggcggaggcctggtccagcccggcggcagcctgaggctgagctgcgccgccagcggcttcgtgttcccctggtatgatatgggctgggtgaggcaggcccccggcaagggcctggagtgggtgtccagcatcgactggcacgggaagatcacctactacgccgacagcgtgaagggcaggttcaccatcagcagggacaacagcaagaacaccctgtacctgcagatgaacagcctgagggccgaggacaccgcagtgtactactgcgccaccgccgaggacgaacccggctacgactactggggccagggcaccctggtgactgtgagcagc

SEQ ID NO: 250 - DNA, 1713 bp, Artificial Sequence
  Humanised
caggtgcagctcgtccagtctggggccgaggtgaagaagcccggagcttctgtgaaggtgtcctgcaaggccagcggctataccttcatcgactacgagatccattgggtgaggcaggctcccgggcagggcctggagtggatgggcgccatcgacccagagaccggaggcacggcgtacaaccagaagttcaagggacgggtcaccatgacaaccgataccagcacctccaccgcttacatggagctgcgcagcctgagaagcgacgacaccgcggtgtactactgtacgcgcatcctgctctactactaccccatggattactggggccagggcacactagtgaccgtgtctagcgccagcaccaagggccccagcgtgttccccctggcccccagcagcaagagcaccagcggcggcacagccgccctgggctgcctggtgaaggactacttccccgaaccggtgaccgtgtcctggaacagcggagccctgaccagcggcgtgcacaccttccccgccgtgctgcagagcagcggcctgtacagcctgagcagcgtggtgaccgtgcccagcagcagcctgggcacccagacctacatctgtaacgtgaaccacaagcccagcaacaccaaggtggacaagaaggtggagcccaagagctgtgacaagacccacacctgccccccctgccctgcccccgagctgctgggaggccccagcgtgttcctgttcccccccaagcctaaggacaccctgatgatcagcagaacccccgaggtgacctgtgtggtggtggatgtgagccacgaggaccctgaggtgaagttcaactggtacgtggacggcgtggaggtgcacaatgccaagaccaagcccagggaggagcagtacaacagcacctaccgggtggtgtccgtgctgaccgtgctgcaccaggattggctgaacggcaaggagtacaagtgtaaggtgtccaacaaggccctgcctgcccctatcgagaaaaccatcagcaaggccaagggccagcccagagagccccaggtgtacaccctgccccctagcagagatgagctgaccaagaaccaggtgtccctgacctgcctggtgaagggcttctaccccagcgacatcgccgtggagtgggagagcaacggccagcccgagaacaactacaagaccaccccccctgtgctggacagcgatggcagcttcttcctgtacagcaagctgaccgtggacaagagcagatggcagcagggcaacgtgttcagctgctccgtgatgcacgaggccctgcacaatcactacacccagaagagcctgagcctgtcccctggcaagaccgtggccgccccctcggaagtgcagctcctggagagcggcggcggcctggtgcagcccggcggcagcctgaggctgagctgcgccgctagcggcttcaccttcaggaacttcggcatgggctgggtcaggcaggcccccggcaagggcctggagtgggtcagctggatcatcagctccggcaccgagacctactacgccgacagcgtgaagggcaggttcaccatcagccgcgacaacagcaagaacaccctgtacctgcagatgaacagcctgagggccgaggacaccgccgtctactactgcgccaagagcctgggcaggttcgactactggggacaggggaccctggtgactgtgagcagc

SEQ ID NO: 251 - DNA, 642 bp, Artificial Sequence
  Humanised
gagatcgtgctgacccagagtccagccaccctcagcctgagccctggggaacgcgccaccctgtcctgccgggcgagtcagaacatctccgactacctgcattggtaccagcagaagcccggccaggcccctcgcctgctgatctactacgcctcccagagcatcagcggaatccccgcccggttctccggaagtgggtccggaaccgactttaccctgaccatcagctctctcgagccagaggacttcgcggtgtactactgccagaacgggcatagtttcccactgaccttcggagggggcacaaaggtggagatcaagcgtacggtggccgcccccagcgtgttcatcttcccccccagcgatgagcagctgaagagcggcaccgccagcgtggtgtgtctgctgaacaacttctacccccgggaggccaaggtgcagtggaaggtggacaatgccctgcagagcggcaacagccaggagagcgtgaccgagcaggacagcaaggactccacctacagcctgagcagcaccctgaccctgagcaaggccgactacgagaagcacaaggtgtacgcctgtgaggtgacccaccagggcctgtccagccccgtgaccaagagcttcaaccggggcgagtgc

SEQ ID NO: 252 - DNA, 1725 bp, Artificial Sequence
  Humanised
caggtgaccctgagggagagcggccccgccctggtgaagcccacccagaccctgaccctgacctgcaccttcagcggctttagcctcagcacctccggcatgggcgtgagctggatcaggcagccacccggcaaaggcctggagtggctggcccacatctactgggacgacgacaagaggtacaaccccagcctgaagagccggctgaccatcagcaaggataccagcaggaaccaggtggtgctgaccatgaccaacatggaccccgtggacaccgctacctactactgcgccaggagggagaccgtcttctactggtacttcgacgtgtggggaaggggcacactagtgaccgtgtccagcgccagcaccaagggccccagcgtgttccccctggcccccagcagcaagagcaccagcggcggcacagccgccctgggctgcctggtgaaggactacttccccgaaccggtgaccgtgtcctggaacagcggagccctgaccagcggcgtgcacaccttccccgccgtgctgcagagcagcggcctgtacagcctgagcagcgtggtgaccgtgcccagcagcagcctgggcacccagacctacatctgtaacgtgaaccacaagcccagcaacaccaaggtggacaagaaggtggagcccaagagctgtgacaagacccacacctgccccccctgccctgcccccgagctgctgggaggccccagcgtgttcctgttcccccccaagcctaaggacaccctgatgatcagcagaacccccgaggtgacctgtgtggtggtggatgtgagccacgaggaccctgaggtgaagttcaactggtacgtggacggcgtggaggtgcacaatgccaagaccaagcccagggaggagcagtacaacagcacctaccgggtggtgtccgtgctgaccgtgctgcaccaggattggctgaacggcaaggagtacaagtgtaaggtgtccaacaaggccctgcctgcccctatcgagaaaaccatcagcaaggccaagggccagcccagagagccccaggtgtacaccctgccccctagcagagatgagctgaccaagaaccaggtgtccctgacctgcctggtgaagggcttctaccccagcgacatcgccgtggagtgggagagcaacggccagcccgagaacaactacaagaccaccccccctgtgctggacagcgatggcagcttcttcctgtacagcaagctgaccgtggacaagagcagatggcagcagggcaacgtgttcagctgctccgtgatgcacgaggccctgcacaatcactacacccagaagagcctgagcctgtcccctggcaagaccgtggccgccccctcgggcgtgcagctcctggagagcggcggaggcctggtccagcccggcggcagcctgaggctgagctgcgccgccagcggcttcgtgttcccctggtatgatatgggctgggtgaggcaggcccccggcaagggcctggagtgggtgtccagcatcgactggaaggggggcaagacctactacgccgacagcgtgaagggcaggttcaccatcagcagggacaacagcaagaacaccctgtacctgcagatgaacagcctgagggccgaggacaccgcagtgtactactgcgccaccgccgaggacgaacccggctacgactactggggccagggcaccctggtgactgtgagcagc

SEQ ID NO: 253 - DNA, 1707 bp, Artificial Sequence
  Humanised
caggtgaccctgagggagagcggccccgccctggtgaagcccacccagaccctgaccctgacctgcaccttcagcggctttagcctcagcacctccggcatgggcgtgagctggatcaggcagccacccggcaaaggcctggagtggctggcccacatctactgggacgacgacaagaggtacaaccccagcctgaagagccggctgaccatcagcaaggataccagcaggaaccaggtggtgctgaccatgaccaacatggaccccgtggacaccgctacctactactgcgccaggagggagaccgtcttctactggtacttcgacgtgtggggaaggggcacactagtgaccgtgtccagcgccagcaccaagggccccagcgtgttccccctggcccccagcagcaagagcaccagcggcggcacagccgccctgggctgcctggtgaaggactacttccccgaaccggtgaccgtgtcctggaacagcggagccctgaccagcggcgtgcacaccttccccgccgtgctgcagagcagcggcctgtacagcctgagcagcgtggtgaccgtgcccagcagcagcctgggcacccagacctacatctgtaacgtgaaccacaagcccagcaacaccaaggtggacaagaaggtggagcccaagagctgtgacaagacccacacctgccccccctgccctgcccccgagctgctgggaggccccagcgtgttcctgttcccccccaagcctaaggacaccctgatgatcagcagaacccccgaggtgacctgtgtggtggtggatgtgagccacgaggaccctgaggtgaagttcaactggtacgtggacggcgtggaggtgcacaatgccaagaccaagcccagggaggagcagtacaacagcacctaccgggtggtgtccgtgctgaccgtgctgcaccaggattggctgaacggcaaggagtacaagtgtaaggtgtccaacaaggccctgcctgcccctatcgagaaaaccatcagcaaggccaagggccagcccagagagccccaggtgtacaccctgccccctagcagagatgagctgaccaagaaccaggtgtccctgacctgcctggtgaagggcttctaccccagcgacatcgccgtggagtgggagagcaacggccagcccgagaacaactacaagaccaccccccctgtgctggacagcgatggcagcttcttcctgtacagcaagctgaccgtggacaagagcagatggcagcagggcaacgtgttcagctgctccgtgatgcacgaggccctgcacaatcactacacccagaagagcctgagcctgtcccctggcaagggcgtgcagctcctggagagcggcggaggcctggtccagcccggcggcagcctgaggctgagctgcgccgccagcggcttcgtgttcccctggtatgatatgggctgggtgaggcaggcccccggcaagggcctggagtgggtgtccagcatcgactggaaggggggcaagacctactacgccgacagcgtgaagggcaggttcaccatcagcagggacaacagcaagaacaccctgtacctgcagatgaacagcctgagggccgaggacaccgcagtgtactactgcgccaccgccgaggacgaacccggctacgactactggggccagggcaccctggtgactgtgagcagc

SEQ ID NO: 254 - DNA, 1725 bp, Artificial Sequence
  Humanised
caggtgaccctgagggagagcggccccgccctggtgaagcccacccagaccctgaccctgacctgcaccttcagcggctttagcctcagcacctccggcatgggcgtgagctggatcaggcagccacccggcaaaggcctggagtggctggcccacatctactgggacgacgacaagaggtacaaccccagcctgaagagccggctgaccatcagcaaggataccagcaggaaccaggtggtgctgaccatgaccaacatggaccccgtggacaccgctacctactactgcgccaggagggagaccgtcttctactggtacttcgacgtgtggggaaggggcacactagtgaccgtgtccagcgccagcaccaagggccccagcgtgttccccctggcccccagcagcaagagcaccagcggcggcacagccgccctgggctgcctggtgaaggactacttccccgaaccggtgaccgtgtcctggaacagcggagccctgaccagcggcgtgcacaccttccccgccgtgctgcagagcagcggcctgtacagcctgagcagcgtggtgaccgtgcccagcagcagcctgggcacccagacctacatctgtaacgtgaaccacaagcccagcaacaccaaggtggacaagaaggtggagcccaagagctgtgacaagacccacacctgccccccctgccctgcccccgagctgctgggaggccccagcgtgttcctgttcccccccaagcctaaggacaccctgatgatcagcagaacccccgaggtgacctgtgtggtggtggatgtgagccacgaggaccctgaggtgaagttcaactggtacgtggacggcgtggaggtgcacaatgccaagaccaagcccagggaggagcagtacaacagcacctaccgggtggtgtccgtgctgaccgtgctgcaccaggattggctgaacggcaaggagtacaagtgtaaggtgtccaacaaggccctgcctgcccctatcgagaaaaccatcagcaaggccaagggccagcccagagagccccaggtgtacaccctgccccctagcagagatgagctgaccaagaaccaggtgtccctgacctgcctggtgaagggcttctaccccagcgacatcgccgtggagtgggagagcaacggccagcccgagaacaactacaagaccaccccccctgtgctggacagcgatggcagcttcttcctgtacagcaagctgaccgtggacaagagcagatggcagcagggcaacgtgttcagctgctccgtgatgcacgaggccctgcacaatcactacacccagaagagcctgagcctgtcccctggcaagaccgtggccgccccctcgggcgtgcagctcctggagagcggcggaggcctggtccagcccggcggcagcctgaggctgagctgcgccgccagcggcttcgtgttcgcctggtatgatatgggctgggtgaggcaggcccccggcaagggcctggagtgggtgtccagcatcgactggcacggggaggtgacctactacgccgacagcgtgaagggcaggttcaccatcagcagggacaacagcaagaacaccctgtacctgcagatgaacagcctgagggccgaggacaccgcagtgtactactgcgccaccgccgaggacgaacccggctacgactactggggccagggcaccctggtgactgtgagcagc

SEQ ID NO: 255 - DNA, 1707 bp, Artificial Sequence
  Humanised
caggtgaccctgagggagagcggccccgccctggtgaagcccacccagaccctgaccctgacctgcaccttcagcggctttagcctcagcacctccggcatgggcgtgagctggatcaggcagccacccggcaaaggcctggagtggctggcccacatctactgggacgacgacaagaggtacaaccccagcctgaagagccggctgaccatcagcaaggataccagcaggaaccaggtggtgctgaccatgaccaacatggaccccgtggacaccgctacctactactgcgccaggagggagaccgtcttctactggtacttcgacgtgtggggaaggggcacactagtgaccgtgtccagcgccagcaccaagggccccagcgtgttccccctggcccccagcagcaagagcaccagcggcggcacagccgccctgggctgcctggtgaaggactacttccccgaaccggtgaccgtgtcctggaacagcggagccctgaccagcggcgtgcacaccttccccgccgtgctgcagagcagcggcctgtacagcctgagcagcgtggtgaccgtgcccagcagcagcctgggcacccagacctacatctgtaacgtgaaccacaagcccagcaacaccaaggtggacaagaaggtggagcccaagagctgtgacaagacccacacctgccccccctgccctgcccccgagctgctgggaggccccagcgtgttcctgttcccccccaagcctaaggacaccctgatgatcagcagaacccccgaggtgacctgtgtggtggtggatgtgagccacgaggaccctgaggtgaagttcaactggtacgtggacggcgtggaggtgcacaatgccaagaccaagcccagggaggagcagtacaacagcacctaccgggtggtgtccgtgctgaccgtgctgcaccaggattggctgaacggcaaggagtacaagtgtaaggtgtccaacaaggccctgcctgcccctatcgagaaaaccatcagcaaggccaagggccagcccagagagccccaggtgtacaccctgccccctagcagagatgagctgaccaagaaccaggtgtccctgacctgcctggtgaagggcttctaccccagcgacatcgccgtggagtgggagagcaacggccagcccgagaacaactacaagaccaccccccctgtgctggacagcgatggcagcttcttcctgtacagcaagctgaccgtggacaagagcagatggcagcagggcaacgtgttcagctgctccgtgatgcacgaggccctgcacaatcactacacccagaagagcctgagcctgtcccctggcaagggcgtgcagctcctggagagcggcggaggcctggtccagcccggcggcagcctgaggctgagctgcgccgccagcggcttcgtgttcgcctggtatgatatgggctgggtgaggcaggcccccggcaagggcctggagtgggtgtccagcatcgactggcacggggaggtgacctactacgccgacagcgtgaagggcaggttcaccatcagcagggacaacagcaagaacaccctgtacctgcagatgaacagcctgagggccgaggacaccgcagtgtactactgcgccaccgccgaggacgaacccggctacgactactggggccagggcaccctggtgactgtgagcagc

SEQ ID NO: 256 - DNA, 1347 bp, Artificial Sequence
  Humanised
caggtgcagctcgtccagtctggggccgaggtgaagaagcccggagcttctgtgaaggtgtcctgcaaggccagcggctataccttcatcgactacgagatccattgggtgaggcaggctcccgggcagggcctggagtggatgggcgccatcgacccagagaccggaggcacggcgtacaaccagaagttcaagggacgggtcaccatgacaaccgataccagcacctccaccgcttacatggagctgcgcagcctgagaagcgacgacaccgcggtgtactactgtacgcgcatcctgctctactactaccccatggattactggggccagggcacactagtcacagtctcctcagcctccaccaagggcccatcggtcttccccctggcaccctcctccaagagcacctctgggggcacagcggccctgggctgcctggtcaaggactacttccccgaaccggtgacggtgtcgtggaactcaggcgccctgaccagcggcgtgcacaccttcccggctgtcctacagtcctcaggactctactccctcagcagcgtggtgaccgtgccctccagcagcttgggcacccagacctacatctgcaacgtgaatcacaagcccagcaacaccaaggtggacaagaaagttgagcccaaatcttgtgacaaaactcacacatgcccaccgtgcccagcacctgaactcctggggggaccgtcagtcttcctcttccccccaaaacccaaggacaccctcatgatctcccggacccctgaggtcacatgcgtggtggtggacgtgagccacgaagaccctgaggtcaagttcaactggtacgtggacggcgtggaggtgcataatgccaagacaaagccgcgggaggagcagtacaacagcacgtaccgtgtggtcagcgtcctcaccgtcctgcaccaggactggctgaatggcaaggagtacaagtgcaaggtctccaacaaagccctcccagcccccatcgagaaaaccatctccaaagccaaagggcagccccgagaaccacaggtgtacaccctgcccccatcccgggatgagctgaccaagaaccaggtcagcctgacctgcctggtcaaaggcttctatcccagcgacatcgccgtggagtgggagagcaatgggcagccggagaacaactacaagaccacgcctcccgtgctggactccgacggctccttcttcctctacagcaagctcaccgtggacaagagcaggtggcagcaggggaacgtcttctcatgctccgtgatgcatgaggctctgcacaaccactacacgcagaagagcctctccctgtctccgggtaaa

SEQ ID NO: 257 - DNA, 2088 bp, Artificial Sequence
  Humanised
caggtgaccctgagggagagcggccccgccctggtgaagcccacacagaccctcactctgacctgcaccgtgagcggcttcagcctgacctcctacagcgtccactgggtgaggcagccccccggcaagggcctggagtggctgggcgtgatctgggcaagcggcggcaccgactacaacagcgccctgatgagcaggctctccatcagcaaggacaccagccggaaccaggtggtgctgaccatgaccaacatggaccccgtggacaccgccacctattactgcgccagggaccctccctctagcctgctgaggctggactactggggcaggggaacactagtgaccgtgtccagcgccagcaccaagggccccagcgtgttccccctggcccccagcagcaagagcaccagcggcggcacagccgccctgggctgcctggtgaaggactacttccccgaaccggtgaccgtgtcctggaacagcggagccctgaccagcggcgtgcacaccttccccgccgtgctgcagagcagcggcctgtacagcctgagcagcgtggtgaccgtgcccagcagcagcctgggcacccagacctacatctgtaacgtgaaccacaagcccagcaacaccaaggtggacaagaaggtggagcccaagagctgtgacaagacccacacctgccccccctgccctgcccccgagctgctgggaggccccagcgtgttcctgttcccccccaagcctaaggacaccctgatgatcagcagaacccccgaggtgacctgtgtggtggtggatgtgagccacgaggaccctgaggtgaagttcaactggtacgtggacggcgtggaggtgcacaatgccaagaccaagcccagggaggagcagtacaacagcacctaccgggtggtgtccgtgctgaccgtgctgcaccaggattggctgaacggcaaggagtacaagtgtaaggtgtccaacaaggccctgcctgcccctatcgagaaaaccatcagcaaggccaagggccagcccagagagccccaggtgtacaccctgccccctagcagagatgagctgaccaagaaccaggtgtccctgacctgcctggtgaagggcttctaccccagcgacatcgccgtggagtgggagagcaacggccagcccgagaacaactacaagaccaccccccctgtgctggacagcgatggcagcttcttcctgtacagcaagctgaccgtggacaagagcagatggcagcagggcaacgtgttcagctgctccgtgatgcacgaggccctgcacaatcactacacccagaagagcctgagcctgtcccctggcaagggcggcggcggatctggcgtgcagctcctggagagcggcggaggcctggtccagcccggcggcagcctgaggctgagctgcgccgccagcggcttcaccttcgcctggtatgatatgggctgggtgaggcaggcccccggcaagggcctggagtgggtgtccagcatcgactggcacggggaggtgacctactacgccgacagcgtgaagggcaggttcaccatcagcagggacaacagcaagaacaccctgtacctgcagatgaacagcctgagggccgaggacaccgcagtgtactactgcgccaccgccgaggacgaacccggctacgactactggggccagggcaccctggtgactgtgagcagcaccgtggccgccccctcgggatccgaagtgcagctcctggagagcggcggcggcctggtgcagcccggcggcagcctgaggctgagctgcgccgctagcggcttcaccttcaggaacttcggcatgggctgggtcaggcaggcccccggcaagggcctggagtgggtcagctggatcatcagctccggcaccgagacctactacgccgacagcgtgaagggcaggttcaccatcagccgcgacaacagcaagaacaccctgtacctgcagatgaacagcctgagggccgaggacaccgccgtctactactgcgccaagagcctgggcaggttcgactactggggacaggggaccctggtgactgtgagcagc

SEQ ID NO: 258 - DNA, 2079 bp, Artificial Sequence
  Humanised
caggtgcagctgcagcagcctggagccgagctggtgaagcccggcgccagcgtgaaaatgtcctgcaaggccagcggctacaccttcaccagctacaacatgcactgggtgaagcagacccccggcaggggcctcgagtggatcggagctatctaccccggcaacggcgacactagctacaaccagaagttcaagggcaaggccaccctgaccgccgacaagagcagcagcaccgcctacatgcagctgagcagcctgaccagcgaggacagcgccgtgtattactgcgccaggagcacctactacggcggcgactggtacttcaacgtctggggcgccggcacactagtgaccgtgtccagcgccagcaccaagggccccagcgtgttccccctggcccccagcagcaagagcaccagcggcggcacagccgccctgggctgcctggtgaaggactacttccccgaaccggtgaccgtgtcctggaacagcggagccctgaccagcggcgtgcacaccttccccgccgtgctgcagagcagcggcctgtacagcctgagcagcgtggtgaccgtgcccagcagcagcctgggcacccagacctacatctgtaacgtgaaccacaagcccagcaacaccaaggtggacaagaaggtggagcccaagagctgtgacaagacccacacctgccccccctgccctgcccccgagctgctgggaggccccagcgtgttcctgttcccccccaagcctaaggacaccctgatgatcagcagaacccccgaggtgacctgtgtggtggtggatgtgagccacgaggaccctgaggtgaagttcaactggtacgtggacggcgtggaggtgcacaatgccaagaccaagcccagggaggagcagtacaacagcacctaccgggtggtgtccgtgctgaccgtgctgcaccaggattggctgaacggcaaggagtacaagtgtaaggtgtccaacaaggccctgcctgcccctatcgagaaaaccatcagcaaggccaagggccagcccagagagccccaggtgtacaccctgccccctagcagagatgagctgaccaagaaccaggtgtccctgacctgcctggtgaagggcttctaccccagcgacatcgccgtggagtgggagagcaacggccagcccgagaacaactacaagaccaccccccctgtgctggacagcgatggcagcttcttcctgtacagcaagctgaccgtggacaagagcagatggcagcagggcaacgtgttcagctgctccgtgatgcacgaggccctgcacaatcactacacccagaagagcctgagcctgtcccctggcaagaccgtggccgccccctcgggatctgacatccagatgacccagagccccagcagcctgagcgccagcgtgggcgacagggtgaccattacctgcagggccagcaggcccatcagcgactggctgcactggtaccaacagaagcccggcaaggctcccaagctgctgatcgcctgggccagcagcctgcagggaggcgtgcccagcaggtttagcggcagcggcagcggcaccgacttcaccctcaccatctcttccctgcagcccgaggacttcgccacctactactgcctgcaggagggctgggggccccctactttcggccagggcaccaaggtggagatcaagaggaccgtggccgccccctcgggatccggcgtgcagctcctggagagcggcggaggcctggtccagcccggcggcagcctgaggctgagctgcgccgccagcggcttcaccttcgcctggtatgatatgggctgggtgaggcaggcccccggcaagggcctggagtgggtgtccagcatcgactggcacggggaggtgacctactacgccgacagcgtgaagggcaggttcaccatcagcagggacaacagcaagaacaccctgtacctgcagatgaacagcctgagggccgaggacaccgcagtgtactactgcgccaccgccgaggacgaacccggctacgactactggggccagggcaccctggtgactgtgagcagc

SEQ ID NO: 259 - DNA, 2103 bp, Artificial Sequence
  Humanised
caggtgcagctgcagcagcctggagccgagctggtgaagcccggcgccagcgtgaaaatgtcctgcaaggccagcggctacaccttcaccagctacaacatgcactgggtgaagcagacccccggcaggggcctcgagtggatcggagctatctaccccggcaacggcgacactagctacaaccagaagttcaagggcaaggccaccctgaccgccgacaagagcagcagcaccgcctacatgcagctgagcagcctgaccagcgaggacagcgccgtgtattactgcgccaggagcacctactacggcggcgactggtacttcaacgtctggggcgccggcacactagtgaccgtgtccagcgccagcaccaagggccccagcgtgttccccctggcccccagcagcaagagcaccagcggcggcacagccgccctgggctgcctggtgaaggactacttccccgaaccggtgaccgtgtcctggaacagcggagccctgaccagcggcgtgcacaccttccccgccgtgctgcagagcagcggcctgtacagcctgagcagcgtggtgaccgtgcccagcagcagcctgggcacccagacctacatctgtaacgtgaaccacaagcccagcaacaccaaggtggacaagaaggtggagcccaagagctgtgacaagacccacacctgccccccctgccctgcccccgagctgctgggaggccccagcgtgttcctgttcccccccaagcctaaggacaccctgatgatcagcagaacccccgaggtgacctgtgtggtggtggatgtgagccacgaggaccctgaggtgaagttcaactggtacgtggacggcgtggaggtgcacaatgccaagaccaagcccagggaggagcagtacaacagcacctaccgggtggtgtccgtgctgaccgtgctgcaccaggattggctgaacggcaaggagtacaagtgtaaggtgtccaacaaggccctgcctgcccctatcgagaaaaccatcagcaaggccaagggccagcccagagagccccaggtgtacaccctgccccctagcagagatgagctgaccaagaaccaggtgtccctgacctgcctggtgaagggcttctaccccagcgacatcgccgtggagtgggagagcaacggccagcccgagaacaactacaagaccaccccccctgtgctggacagcgatggcagcttcttcctgtacagcaagctgaccgtggacaagagcagatggcagcagggcaacgtgttcagctgctccgtgatgcacgaggccctgcacaatcactacacccagaagagcctgagcctgtcccctggcaagaccgtggccgccccctcgggatctgaagtgcagctcctggagagcggcggcggcctggtgcagcccggcggcagcctgaggctgagctgcgccgctagcggcttcaccttcaggaacttcggcatgggctgggtcaggcaggcccccggcaagggcctggagtgggtcagctggatcatcagctccggcaccgagacctactacgccgacagcgtgaagggcaggttcaccatcagccgcgacaacagcaagaacaccctgtacctgcagatgaacagcctgagggccgaggacaccgccgtctactactgcgccaagagcctgggcaggttcgactactggggacaggggaccctggtgactgtgagcagcaccgtggccgccccctcgggatccggcgtgcagctcctggagagcggcggaggcctggtccagcccggcggcagcctgaggctgagctgcgccgccagcggcttcaccttcgcctggtatgatatgggctgggtgaggcaggcccccggcaagggcctggagtgggtgtccagcatcgactggcacggggaggtgacctactacgccgacagcgtgaagggcaggttcaccatcagcagggacaacagcaagaacaccctgtacctgcagatgaacagcctgagggccgaggacaccgcagtgtactactgcgccaccgccgaggacgaacccggctacgactactggggccagggcaccctggtgactgtgagcagc

SEQ ID NO: 260 - DNA, 1701 bp, Artificial Sequence
  Humanised
gaggtgcagctggtggaaagcggcggcggcctggtgcagcccggcggctccctgaggctgagctgcgccgctagcggctacaccttcaccagctactggctccactgggtcaggcaggccccaggcaagggactggagtgggtgggcatgatcgaccccagcaacagcgacaccaggttcaaccccaacttcaaggacaggttcaccatcagcgccgacactagcaagaacaccgcctacctgcagatgaacagcctgagggccgaggacaccgccgtgtattactgcgccacctacaggagctacgtcacccccctggattactggggccagggcacactagtgaccgtgtccagcgccagcaccaagggccccagcgtgttccccctggcccccagcagcaagagcaccagcggcggcacagccgccctgggctgcctggtgaaggactacttccccgaaccggtgaccgtgtcctggaacagcggagccctgaccagcggcgtgcacaccttccccgccgtgctgcagagcagcggcctgtacagcctgagcagcgtggtgaccgtgcccagcagcagcctgggcacccagacctacatctgtaacgtgaaccacaagcccagcaacaccaaggtggacaagaaggtggagcccaagagctgtgacaagacccacacctgccccccctgccctgcccccgagctgctgggaggccccagcgtgttcctgttcccccccaagcctaaggacaccctgatgatcagcagaacccccgaggtgacctgtgtggtggtggatgtgagccacgaggaccctgaggtgaagttcaactggtacgtggacggcgtggaggtgcacaatgccaagaccaagcccagggaggagcagtacaacagcacctaccgggtggtgtccgtgctgaccgtgctgcaccaggattggctgaacggcaaggagtacaagtgtaaggtgtccaacaaggccctgcctgcccctatcgagaaaaccatcagcaaggccaagggccagcccagagagccccaggtgtacaccctgccccctagcagagatgagctgaccaagaaccaggtgtccctgagctgcgccgtgaagggcttctaccccagcgacatcgccgtggagtgggagagcaacggccagcccgagaacaactacaagaccaccccccctgtgctggacagcgatggcagcttcttcctggtgagcaagctgaccgtggacaagagcagatggcagcagggcaacgtgttcagctgctccgtgatgcacgaggccctgcacaatcactacacccagaagagcctgagcctgtcccctggcaagggatccgaggtgcagctcctggtcagcggcggcggcctggtccagcccggaggctcactgaggctgagctgcgccgctagcggcttcaccttcaaggcctaccccatgatgtgggtcaggcaggcccccggcaaaggcctggagtgggtgtctgagatcagccccagcggcagctacacctactacgccgacagcgtgaagggcaggttcaccatcagcagggacaacagcaagaacaccctgtacctgcagatgaactctctgagggccgaggacaccgccgtgtactactgcgccaaggaccccaggaagctggactattggggccagggcactctggtgaccgtgagcagc

SEQ ID NO: 261 - DNA, 1020 bp, Artificial Sequence
  Humanised
tgccccccctgccctgcccccgagctgctgggaggccccagcgtgttcctgttcccccccaagcctaaggacaccctgatgatcagcagaacccccgaggtgacctgtgtggtggtggatgtgagccacgaggaccctgaggtgaagttcaactggtacgtggacggcgtggaggtgcacaatgccaagaccaagcccagggaggagcagtacaacagcacctaccgggtggtgtccgtgctgaccgtgctgcaccaggattggctgaacggcaaggagtacaagtgtaaggtgtccaacaaggccctgcctgcccctatcgagaaaaccatcagcaaggccaagggccagcccagagagccccaggtgtacaccctgccccctagcagagatgagctgaccaagaaccaggtgtccctgtggtgcctggtgaagggcttctaccccagcgacatcgccgtggagtgggagagcaacggccagcccgagaacaactacaagaccaccccccctgtgctggacagcgatggcagcttcttcctgtacagcaagctgaccgtggacaagagcagatggcagcagggcaacgtgttcagctgctccgtgatgcacgaggccctgcacaatcactacacccagaagagcctgagcctgtcccctggcaagggatccgaggtgcagctcctggtcagcggcggcggcctggtccagcccggaggctcactgaggctgagctgcgccgctagcggcttcaccttcaaggcctaccccatgatgtgggtcaggcaggcccccggcaaaggcctggagtgggtgtctgagatcagccccagcggcagctacacctactacgccgacagcgtgaagggcaggttcaccatcagcagggacaacagcaagaacaccctgtacctgcagatgaactctctgagggccgaggacaccgccgtgtactactgcgccaaggaccccaggaagctggactattggggccagggcactctggtgaccgtgagcagc

SEQ ID NO: 262 - DNA, 660 bp, Artificial Sequence
  Humanised
gacatccagatgacccagagccccagcagcctgagcgcctcagtgggagacagggtgaccatcacctgcaagagcagccagagcctcctgtacaccagcagccagaagaactacctggcctggtaccagcagaaacccggcaaggcccccaagctgctgatctactgggctagcaccagggagtcaggcgtgcccagcaggttcagcggcagcggcagcggcaccgacttcactctgaccatcagcagcctgcagcccgaggacttcgccacctactactgccagcagtactacgcctatccctggaccttcggccagggcaccaaggtggagatcaagcgtacggtggccgcccccagcgtgttcatcttcccccccagcgatgagcagctgaagagcggcaccgccagcgtggtgtgtctgctgaacaacttctacccccgggaggccaaggtgcagtggaaggtggacaatgccctgcagagcggcaacagccaggagagcgtgaccgagcaggacagcaaggactccacctacagcctgagcagcaccctgaccctgagcaaggccgactacgagaagcacaaggtgtacgcctgtgaggtgacccaccagggcctgtccagccccgtgaccaagagcttcaaccggggcgagtgc

SEQ ID NO: 263 - DNA, 1656 bp, Artificial Sequence
  Humanised
gaggtgcagctggtggaaagcggcggcggcctggtgcagcccggcggctccctgaggctgagctgcgccgctagcggctacaccttcaccagctactggctccactgggtcaggcaggccccaggcaagggactggagtgggtgggcatgatcgaccccagcaacagcgacaccaggttcaaccccaacttcaaggacaggttcaccatcagcgccgacactagcaagaacaccgcctacctgcagatgaacagcctgagggccgaggacaccgccgtgtattactgcgccacctacaggagctacgtcacccccctggattactggggccagggcacactagtcaccgtgagcagcgccagcaccaagggccccagcgtgttccccctggccccctgcagcagaagcaccagcgagagcacagccgccctgggctgcctggtgaaggactacttccccgagcccgtgaccgtgagctggaacagcggagccctgaccagcggcgtgcacaccttccccgccgtgctgcagagcagcggcctgtacagcctgagcagcgtggtgaccgtgcccagcagcagcctgggcaccaagacctacacctgcaacgtggaccacaagcccagcaacaccaaggtggacaagcgggtggcccccgagttcctgggcggaccctccgtgttcctgttcccccccaagcccaaggacaccctgatgatcagccggacccccgaggtgacctgcgtggtggtggacgtgagccaggaagatcccgaggtccagttcaattggtacgtggacggcgtggaggtgcacaacgccaagaccaagccccgggaggaacagttcaacagcacctaccgggtggtgtccgtgctgaccgtgctgcaccaggactggctgaacggcaaagaatacaagtgcaaggtgtccaacaagggcctgcccagctccatcgagaaaaccatcagcaaggccaagggccagcctcgggagccccaggtgtacaccctgcccccatcccaggaagagatgaccaagaaccaggtgtccctgacctgtctggtgaagggcttctaccccagcgacatcgccgtggagtgggagagcaacggccagcccgagaacaactacaagaccaccccccctgtgctggacagcgacggcagcttcttcctgtacagcaggctgaccgtggacaagagccggtggcaggaaggcaacgtctttagctgcagcgtgatgcacgaggccctgcacaaccactacacccagaagagcctgagcctgtccctgggcaagggatccgaggtgcagctcctggtcagcggcggcggcctggtccagcccggaggctcactgaggctgagctgcgccgctagcggcttcaccttcaaggcctaccccatgatgtgggtcaggcaggcccccggcaaaggcctggagtgggtgtctgagatcagccccagcggcagctacacctactacgccgacagcgtgaagggcaggttcaccatcagcagggacaacagcaagaacaccctgtacctgcagatgaactctctgagggccgaggacaccgccgtgtactactgcgccaaggaccccaggaagctggactattggggccagggcactctggtgaccgtgagcagc

SEQ ID NO: 264 - DNA, 1347 bp, Artificial Sequence
  Humanised
gaggtgcagctggtggaaagcggcggcggcctggtgcagcccggcggctccctgaggctgagctgcgccgctagcggctacaccttcaccagctactggctccactgggtcaggcaggccccaggcaagggactggagtgggtgggcatgatcgaccccagcaacagcgacaccaggttcaaccccaacttcaaggacaggttcaccatcagcgccgacactagcaagaacaccgcctacctgcagatgaacagcctgagggccgaggacaccgccgtgtattactgcgccacctacaggagctacgtcacccccctggattactggggccagggcacactagtgaccgtgtccagcgccagcaccaagggccccagcgtgttccccctggcccccagcagcaagagcaccagcggcggcacagccgccctgggctgcctggtgaaggactacttccccgaaccggtgaccgtgtcctggaacagcggagccctgaccagcggcgtgcacaccttccccgccgtgctgcagagcagcggcctgtacagcctgagcagcgtggtgaccgtgcccagcagcagcctgggcacccagacctacatctgtaacgtgaaccacaagcccagcaacaccaaggtggacaagaaggtggagcccaagagctgtgacaagacccacacctgccccccctgccctgcccccgagctgctgggaggccccagcgtgttcctgttcccccccaagcctaaggacaccctgatgatcagcagaacccccgaggtgacctgtgtggtggtggatgtgagccacgaggaccctgaggtgaagttcaactggtacgtggacggcgtggaggtgcacaatgccaagaccaagcccagggaggagcagtacaacagcacctaccgggtggtgtccgtgctgaccgtgctgcaccaggattggctgaacggcaaggagtacaagtgtaaggtgtccaacaaggccctgcctgcccctatcgagaaaaccatcagcaaggccaagggccagcccagagagccccaggtgtacaccctgccccctagcagagatgagctgaccaagaaccaggtgtccctgagctgcgccgtgaagggcttctaccccagcgacatcgccgtggagtgggagagcaacggccagcccgagaacaactacaagaccaccccccctgtgctggacagcgatggcagcttcttcctggtgagcaagctgaccgtggacaagagcagatggcagcagggcaacgtgttcagctgctccgtgatgcacgaggccctgcacaatcactacacccagaagagcctgagcctgtcccctggcaag

SEQ ID NO: 265 - DNA, 666 bp, Artificial Sequence
  Humanised
tgccccccctgccctgcccccgagctgctgggaggccccagcgtgttcctgttcccccccaagcctaaggacaccctgatgatcagcagaacccccgaggtgacctgtgtggtggtggatgtgagccacgaggaccctgaggtgaagttcaactggtacgtggacggcgtggaggtgcacaatgccaagaccaagcccagggaggagcagtacaacagcacctaccgggtggtgtccgtgctgaccgtgctgcaccaggattggctgaacggcaaggagtacaagtgtaaggtgtccaacaaggccctgcctgcccctatcgagaaaaccatcagcaaggccaagggccagcccagagagccccaggtgtacaccctgccccctagcagagatgagctgaccaagaaccaggtgtccctgtggtgcctggtgaagggcttctaccccagcgacatcgccgtggagtgggagagcaacggccagcccgagaacaactacaagaccaccccccctgtgctggacagcgatggcagcttcttcctgtacagcaagctgaccgtggacaagagcagatggcagcagggcaacgtgttcagctgctccgtgatgcacgaggccctgcacaatcactacacccagaagagcctgagcctgtcccctggcaag

SEQ ID NO: 266 - DNA, 1302 bp, Artificial Sequence
  Humanised
gaggtgcagctggtggaaagcggcggcggcctggtgcagcccggcggctccctgaggctgagctgcgccgctagcggctacaccttcaccagctactggctccactgggtcaggcaggccccaggcaagggactggagtgggtgggcatgatcgaccccagcaacagcgacaccaggttcaaccccaacttcaaggacaggttcaccatcagcgccgacactagcaagaacaccgcctacctgcagatgaacagcctgagggccgaggacaccgccgtgtattactgcgccacctacaggagctacgtcacccccctggattactggggccagggcacactagtcaccgtgagcagcgccagcaccaagggccccagcgtgttccccctggccccctgcagcagaagcaccagcgagagcacagccgccctgggctgcctggtgaaggactacttccccgagcccgtgaccgtgagctggaacagcggagccctgaccagcggcgtgcacaccttccccgccgtgctgcagagcagcggcctgtacagcctgagcagcgtggtgaccgtgcccagcagcagcctgggcaccaagacctacacctgcaacgtggaccacaagcccagcaacaccaaggtggacaagcgggtggcccccgagttcctgggcggaccctccgtgttcctgttcccccccaagcccaaggacaccctgatgatcagccggacccccgaggtgacctgcgtggtggtggacgtgagccaggaagatcccgaggtccagttcaattggtacgtggacggcgtggaggtgcacaacgccaagaccaagccccgggaggaacagttcaacagcacctaccgggtggtgtccgtgctgaccgtgctgcaccaggactggctgaacggcaaagaatacaagtgcaaggtgtccaacaagggcctgcccagctccatcgagaaaaccatcagcaaggccaagggccagcctcgggagccccaggtgtacaccctgcccccatcccaggaagagatgaccaagaaccaggtgtccctgacctgtctggtgaagggcttctaccccagcgacatcgccgtggagtgggagagcaacggccagcccgagaacaactacaagaccaccccccctgtgctggacagcgacggcagcttcttcctgtacagcaggctgaccgtggacaagagccggtggcaggaaggcaacgtctttagctgcagcgtgatgcacgaggccctgcacaaccactacacccagaagagcctgagcctgtccctgggcaag

SEQ ID NO: 267 - DNA, 1701 bp, Artificial Sequence
  Humanised
caggtgaccctgagggagagcggccccgccctggtgaagcccacccagaccctgaccctgacctgcaccttcagcggctttagcctcagcacctccggcatgggcgtgagctggatcaggcagccacccggcaaaggcctggagtggctggcccacatctactgggacgacgacaagaggtacaaccccagcctgaagagccggctgaccatcagcaaggataccagcaggaaccaggtggtgctgaccatgaccaacatggaccccgtggacaccgctacctactactgcgccaggagggagaccgtcttctactggtacttcgacgtgtggggaaggggcacactagtcaccgtgagcagcgccagcaccaagggccccagcgtgttccccctggccccctgcagcagaagcaccagcgagagcacagccgccctgggctgcctggtgaaggactacttccccgagcccgtgaccgtgagctggaacagcggagccctgaccagcggcgtgcacaccttccccgccgtgctgcagagcagcggcctgtacagcctgagcagcgtggtgaccgtgcccagcagcaacttcggcacccagacctacacctgcaacgtggaccacaagcccagcaacaccaaggtggacaagaccgtggagcggaagtgctgcgtggagtgccccccctgccctgcccctcctgtggccggaccctccgtgttcctgttcccccccaagcccaaggacaccctgatgatcagccggacccccgaggtgacctgcgtggtggtggacgtgagccacgaggaccccgaggtgcagttcaattggtacgtggacggcgtggaggtgcacaacgccaagaccaagccccgggaggaacagttcaacagcaccttccgggtggtgtccgtgctgaccgtggtgcaccaggactggctgaacggcaaagaatacaagtgcaaggtgtccaacaagggcctgcctgcccccatcgagaaaaccatcagcaagaccaagggccagcccagggaaccccaggtgtacaccctgccccccagccgggaggaaatgaccaagaaccaggtgtccctgacctgtctggtgaagggcttctaccccagcgacatcgccgtggagtgggagagcaacggccagcccgagaacaactacaagaccaccccccccatgctggacagcgacggcagcttcttcctgtacagcaagctgacagtggacaagagccggtggcagcagggcaacgtgttcagctgcagcgtgatgcacgaggccctgcacaaccactacacccagaagagcctgagcctgtcccccggcaagggatccggcgtgcagctcctggagagcggcggaggcctggtccagcccggcggcagcctgaggctgagctgcgccgccagcggcttcaccttcgcctggtatgatatgggctgggtgaggcaggcccccggcaagggcctggagtgggtgtccagcatcgactggcacggggaggtgacctactacgccgacagcgtgaagggcaggttcaccatcagcagggacaacagcaagaacaccctgtacctgcagatgaacagcctgagggccgaggacaccgcagtgtactactgcgccaccgccgaggacgaacccggctacgactactggggccagggcaccctggtgactgtgagcagc

SEQ ID NO: 268 - DNA, 1704 bp, Artificial Sequence
  Humanised
caggtgaccctgagggagagcggccccgccctggtgaagcccacccagaccctgaccctgacctgcaccttcagcggctttagcctcagcacctccggcatgggcgtgagctggatcaggcagccacccggcaaaggcctggagtggctggcccacatctactgggacgacgacaagaggtacaaccccagcctgaagagccggctgaccatcagcaaggataccagcaggaaccaggtggtgctgaccatgaccaacatggaccccgtggacaccgctacctactactgcgccaggagggagaccgtcttctactggtacttcgacgtgtggggaaggggcacactagtcaccgtgagcagcgccagcaccaagggccccagcgtgttccccctggccccctgcagcagaagcaccagcgagagcacagccgccctgggctgcctggtgaaggactacttccccgagcccgtgaccgtgagctggaacagcggagccctgaccagcggcgtgcacaccttccccgccgtgctgcagagcagcggcctgtacagcctgagcagcgtggtgaccgtgcccagcagcagcctgggcaccaagacctacacctgcaacgtggaccacaagcccagcaacaccaaggtggacaagcgggtggagagcaagtacggccctccctgccccagctgccctgcccccgagttcctgggcggaccctccgtgttcctgttcccccccaagcccaaggacaccctgatgatcagccggacccccgaggtgacctgcgtggtggtggacgtgagccaggaagatcccgaggtccagttcaattggtacgtggacggcgtggaggtgcacaacgccaagaccaagccccgggaggaacagttcaacagcacctaccgggtggtgtccgtgctgaccgtgctgcaccaggactggctgaacggcaaagaatacaagtgcaaggtgtccaacaagggcctgcccagctccatcgagaaaaccatcagcaaggccaagggccagcctcgggagccccaggtgtacaccctgcccccatcccaggaagagatgaccaagaaccaggtgtccctgacctgtctggtgaagggcttctaccccagcgacatcgccgtggagtgggagagcaacggccagcccgagaacaactacaagaccaccccccctgtgctggacagcgacggcagcttcttcctgtacagcaggctgaccgtggacaagagccggtggcaggaaggcaacgtctttagctgcagcgtgatgcacgaggccctgcacaaccactacacccagaagagcctgagcctgtccctgggcaagggatccggcgtgcagctcctggagagcggcggaggcctggtccagcccggcggcagcctgaggctgagctgcgccgccagcggcttcaccttcgcctggtatgatatgggctgggtgaggcaggcccccggcaagggcctggagtgggtgtccagcatcgactggcacggggaggtgacctactacgccgacagcgtgaagggcaggttcaccatcagcagggacaacagcaagaacaccctgtacctgcagatgaacagcctgagggccgaggacaccgcagtgtactactgcgccaccgccgaggacgaacccggctacgactactggggccagggcaccctggtgactgtgagcagc

SEQ ID NO: 269 - DNA, 1704 bp, Artificial Sequence
  Humanised
caggtgaccctgagggagagcggccccgccctggtgaagcccacccagaccctgaccctgacctgcaccttcagcggctttagcctcagcacctccggcatgggcgtgagctggatcaggcagccacccggcaaaggcctggagtggctggcccacatctactgggacgacgacaagaggtacaaccccagcctgaagagccggctgaccatcagcaaggataccagcaggaaccaggtggtgctgaccatgaccaacatggaccccgtggacaccgctacctactactgcgccaggagggagaccgtcttctactggtacttcgacgtgtggggaaggggcacactagtcaccgtgagcagcgccagcaccaagggccccagcgtgttccccctggccccctgcagcagaagcaccagcgagagcacagccgccctgggctgcctggtgaaggactacttccccgagcccgtgaccgtgagctggaacagcggagccctgaccagcggcgtgcacaccttccccgccgtgctgcagagcagcggcctgtacagcctgagcagcgtggtgaccgtgcccagcagcagcctgggcaccaagacctacacctgcaacgtggaccacaagcccagcaacaccaaggtggacaagcgggtggagagcaagtacggccctccctgccccccctgccctgcccccgagttcgagggcggaccctccgtgttcctgttcccccccaagcccaaggacaccctgatgatcagccggacccccgaggtgacctgcgtggtggtggacgtgagccaggaagatcccgaggtccagttcaattggtacgtggacggcgtggaggtgcacaacgccaagaccaagccccgggaggaacagttcaacagcacctaccgggtggtgtccgtgctgaccgtgctgcaccaggactggctgaacggcaaagaatacaagtgcaaggtgtccaacaagggcctgcccagctccatcgagaaaaccatcagcaaggccaagggccagcctcgggagccccaggtgtacaccctgcccccatcccaggaagagatgaccaagaaccaggtgtccctgacctgtctggtgaagggcttctaccccagcgacatcgccgtggagtgggagagcaacggccagcccgagaacaactacaagaccaccccccctgtgctggacagcgacggcagcttcttcctgtacagcaggctgaccgtggacaagagccggtggcaggaaggcaacgtctttagctgcagcgtgatgcacgaggccctgcacaaccactacacccagaagagcctgagcctgtccctgggcaagggatccggcgtgcagctcctggagagcggcggaggcctggtccagcccggcggcagcctgaggctgagctgcgccgccagcggcttcaccttcgcctggtatgatatgggctgggtgaggcaggcccccggcaagggcctggagtgggtgtccagcatcgactggcacggggaggtgacctactacgccgacagcgtgaagggcaggttcaccatcagcagggacaacagcaagaacaccctgtacctgcagatgaacagcctgagggccgaggacaccgcagtgtactactgcgccaccgccgaggacgaacccggctacgactactggggccagggcaccctggtgactgtgagcagc

SEQ ID NO: 270 - DNA, 1641 bp, Artificial Sequence
  Humanised
caggtgaccctgagggagagcggccccgccctggtgaagcccacccagaccctgaccctgacctgcaccttcagcggctttagcctcagcacctccggcatgggcgtgagctggatcaggcagccacccggcaaaggcctggagtggctggcccacatctactgggacgacgacaagaggtacaaccccagcctgaagagccggctgaccatcagcaaggataccagcaggaaccaggtggtgctgaccatgaccaacatggaccccgtggacaccgctacctactactgcgccaggagggagaccgtcttctactggtacttcgacgtgtggggaaggggcacactagtgaccgtgtccagcgccagcaccaagggccccagcgtgttccccctggcccccagcagcaagagcaccagcggcggcacagccgccctgggctgcctggtgaaggactacttccccgaaccggtgaccgtgtcctggaacagcggagccctgaccagcggcgtgcacaccttccccgccgtgctgcagagcagcggcctgtacagcctgagcagcgtggtgaccgtgcccagcagcagcctgggcacccagacctacatctgtaacgtgaaccacaagcccagcaacaccaaggtggacaagaaggtggagcccaagagctgtgacaagacccacacctgccccccctgccctgcccccgagctgctgggaggccccagcgtgttcctgttcccccccaagcctaaggacaccctgatgatcagcagaacccccgaggtgacctgtgtggtggtggatgtgagccacgaggaccctgaggtgaagttcaactggtacgtggacggcgtggaggtgcacaatgccaagaccaagcccagggaggagcagtacaacagcacctaccgggtggtgtccgtgctgaccgtgctgcaccaggattggctgaacggcaaggagtacaagtgtaaggtgtccaacaaggccctgcctgcccctatcgagaaaaccatcagcaaggccaagggccagcccagagagccccaggtgtacaccctgccccctagcagagatgagctgaccaagaaccaggtgtccctgacctgcctggtgaagggcttctaccccagcgacatcgccgtggagtgggagagcaacggccagcccgagaacaactacaagaccaccccccctgtgctggacagcgatggcagcttcttcctgtacagcaagctgaccgtggacaagagcagatggcagcagggcaacgtgttcagctgctccgtgatgcacgaggccctgcacaatcactacacccagaagagcctgagcctgtcccctggcaagggatccgtgagcgacgtgccaagggacctcgaggtggtggcagccactcccacctctctgctgatcagctgggacacacacaacgcctacaacggctactacaggatcacctacggagagaccggcggcaatagccccgtgagggagttcaccgtgccccaccccgaggtgaccgccaccattagcggcctgaagcccggcgtggacgataccatcaccgtctacgccgtgaccaaccaccacatgcccctgaggatcttcggccccatcagcatcaaccataggacc

SEQ ID NO: 271 - protein, 8 aa, Artificial Sequence
  Amino acid sequence identified using molecular biology techniques.
GSTVAAPS

SEQ ID NO: 272 - protein, 8 aa, Artificial Sequence
  Amino acid sequence identified using molecular biology techniques.
TVAAPSGS

SEQ ID NO: 273 - protein, 10 aa, Artificial Sequence
  Amino acid sequence identified using molecular biology techniques.r
GSTVAAPSGS

SEQ ID NO: 274 - protein, 6 aa, Artificial Sequence
  Amino acid sequence identified using molecular biology techniques.
TVAAPS

SEQ ID NO: 275 - protein, 8 aa, Artificial Sequence
  Amino acid sequence identified using molecular biology techniques.
TVAAPSGS

SEQ ID NO: 276 - protein, 6 aa, Artificial Sequence
  Amino acid sequence identified using molecular biology techniques.
TVAAPS

SEQ ID NO: 277 - protein, 18 aa, Artificial Sequence
  Amino acid sequence identified using molecular biology techniques.
ELQLEESCAEAQDGELDG

SEQ ID NO: 278 - protein, 8 aa, Artificial Sequence
  Amino acid sequence identified using molecular biology techniques.
TVAAPSGS

SEQ ID NO: 279 - protein, 8 aa, Artificial Sequence
  Amino acid sequence identified using molecular biology techniques.
TVAAPSGS

SEQ ID NO: 280 - protein, 8 aa, Artificial Sequence
  Amino acid sequence identified using molecular biology techniques.
TVAAPSGS

SEQ ID NO: 281 - protein, 8 aa, Artificial Sequence
  Amino acid sequence identified using molecular biology techniques.
TVAAPSGS

SEQ ID NO: 282 - protein, 8 aa, Artificial Sequence
  Amino acid sequence identified using molecular biology techniques.
TVAAPSGS

SEQ ID NO: 283 - protein, 8 aa, Artificial Sequence
  Amino acid sequence identified using molecular biology techniques.
TVAAPSGS

SEQ ID NO: 284 - protein, 8 aa, Artificial Sequence
  Amino acid sequence identified using molecular biology techniques.
TVAAPSGS

SEQ ID NO: 285 - protein, 5 aa, Artificial Sequence
  Amino acid sequence identified using molecular biology techniques.
GGGGS

SEQ ID NO: 286 - protein, 8 aa, Artificial Sequence
  Amino acid sequence identified using molecular biology techniques.
STGGGGGS

SEQ ID NO: 287 - protein, 13 aa, Artificial Sequence
  Amino acid sequence identified using molecular biology techniques.
STGGGGGSGGGGS

SEQ ID NO: 288 - protein, 8 aa, Artificial Sequence
  Amino acid sequence identified using molecular biology techniques.
GSTVAAPS

SEQ ID NO: 289 - protein, 4 aa, Artificial Sequence
  Amino acid sequence identified using molecular biology techniques.
GSTG

SEQ ID NO: 290 - protein, 8 aa, Artificial Sequence
  Amino acid sequence identified using molecular biology techniques.
GSTVAAPS

SEQ ID NO: 291 - protein, 6 aa, Artificial Sequence
  Amino acid sequence identified using molecular biology techniques.
TVAAPS

SEQ ID NO: 292 - protein, 6 aa, Artificial Sequence
  Amino acid sequence identified using molecular biology techniques.
TVAAPS

SEQ ID NO: 293 - protein, 4 aa, Artificial Sequence
  Amino acid sequence identified using molecular biology techniques.
GSTG

SEQ ID NO: 294 - protein, 6 aa, Artificial Sequence
  Amino acid sequence identified using molecular biology techniques.
TVAAPS

SEQ ID NO: 295 - protein, 5 aa, Artificial Sequence
  Amino acid sequence identified using molecular biology techniques.
GGGGS
